United States Patent Application Publication US 2007/0143875 A1 - sequence listing, part 2

SEQ ID NO: 6006 - DNA, 431 bp, Triticum aestivum
  unsure at all n locations
  Clone ID: LIB104-041-Q1-E1-E3
ttcacgggtcgacgggttccttaaaacagttggtgcaaatattgatatgtaggaagggaatattagattccaatttccactaaggaaaggcatggaacactttacaagaaagaaagttaaattaccttgtgaatctatcatgcgagctacttatgaattgaatgccaaagatggtactacatagatctattctcacttttatgcctagctaggggcgttaaacgatagcgctagttgggaggcaacccaatttgatttttgtttcttgctttttgcttctgtttagtaataaatatttcatctagcttctgtttagatatgtttttatgttttaattagtgtttgtgccaagtagaacctataggataacctacggtgataattaatttgattctgctganaaacagaaagttttacgcgcacgaaaataa

SEQ ID NO: 6007 - DNA, 408 bp, Triticum aestivum
  Clone ID: LIB104-041-Q1-E1-E5
atagtgagtcgtattagcagctggaggaggcaagatggccggaggtcgcctgcccctactgctacgaggactacgacctcggctccctctgcgtccacctcgaggaggaccacccctacgagccacaccccgcaccttgccccatctgctctgaaaagattacaagagatatgctaaatcatatcaccatgcatcatggttacttgttcaaggcgcttctaggaggcggtcatagtcataggtcaaggaacaccaccactgccactacaaatatctatgctgatccactgctttcatcgtttggcctgggttttgcaacatcagatgccgaagaaccatcgaaatcatcagttccggttctcgatgatacttcaattcctaaggaggggcctcctcaaccttgggaat

SEQ ID NO: 6008 - DNA, 214 bp, Triticum aestivum
  Clone ID: LIB104-041-Q1-E1-E6
atagtgagtcgtattaggaagtggtggttgtctgcacgggtgaagtcgccagccactttcacttcgaagatacagaccttggggcgatcagcatggagagaatgcgaggccacctcggctagtagattactactatagacgagtacgacacggacgcagacttcagtgaattagtgcaactgcctcagggtgtatcacggtgagttgttcaggg

SEQ ID NO: 6009 - DNA, 212 bp, Triticum aestivum
  Clone ID: LIB104-041-Q1-E1-E7
atagtgagtcgtattaaactccctgcggcgcctgatccccatgtgtcgagggtgccaggcgtcggcgtgcggcgaagatccgggcgccggcggcgcaacggcgctgcagaagcacgcggcgttcatcgacggtgacagggagcgcgtcgtcaacttcgctgacacgtacgcaccctgtccggcccgcggccttcgagttgctgcctccaccg

SEQ ID NO: 6010 - DNA, 380 bp, Triticum aestivum
  Clone ID: LIB104-041-Q1-E1-E9
gtgagtcgtattaatagtactactgtagctacgatacctgtagttcgcctgccctgctgctacttcagtagtcatgcttgaataataatggtctcagtattaaaaaaaaaaaaaaaaaaaaaaaaaaaaaaaaaaaaaaaaaaaaaaaaaaaaaaaaaaaaaaaaaaaaaaaaaaaaaaaaaaaaaaaaaaaaaaaaaaaaaaaaaaaaaaaaaaaaaaaaaaaaaaaaaaaaaaaaaaaaaaaaaaaaaaggggggcccaaaaaaatttaaagctaaataaggtgtacaagaaatttaaaaaccttcaaaaatttcaccaaaattaaaattaaaggggctttttttaaaaagtttttagggggaaaaactgggggttta

SEQ ID NO: 6011 - DNA, 424 bp, Triticum aestivum
  Clone ID: LIB104-041-Q1-E1-F11
ggtccagaattcccgggtcgacgggtatattattttgagagtcatttagaacaacatggtaatttgctttggttataaaattagtcctaatatgatgggcatccaagatgggtataataaaaactttcatataaagtgcattgaatactatgagaagtttggttctttatgattgttttgagatatgaagatggtgatatcagagtcatgctagtagagtagttgtgaattttagagatacttgtgttaaagtttgtgattcccgtagcatgcacgtatggtgaaccgttatgtgatgaagttggagcttgatttatttattgatatcttccttatgagtggcagtcggggacgagcgatggtcttttcctaccaatctatccccctaggagcttgcgcatagtacttcgtttggataactaat

SEQ ID NO: 6012 - DNA, 220 bp, Triticum aestivum
  Clone ID: LIB104-041-Q1-E1-F5
caatacgaatcactataatgactcctatcacaaggagggcatgatggagaagatcaaggacaagatcagcggcgacggccacagcgacggcaacaatgacggcgaccgtaaaaaaaaaaaaaaaaaaacggacgctcaagcggatgcactctaagatccacgcttacgtaaccttacatgccacctcatatctcttctaaattgtcaccaaaattcatct

SEQ ID NO: 6013 - DNA, 234 bp, Triticum aestivum
  Clone ID: LIB104-041-Q1-E1-F9
gtgagtcgtattatgtcaagtagtggacagataagccaaccactggatgtggttttcagggatttttgcagtgggatttgtagggtactatgctgcgctgtgtttgggatttgaaataaaacgatgggagatgtgccacgctcttaaaaaaacaaaaaaaaaaaaaaaaaaaaaaaaaaactcaaaaaaaataaaaaaaaagaaaaaaaaaaaaacaaaaacaaaacaaactct

SEQ ID NO: 6014 - DNA, 456 bp, Triticum aestivum
  Clone ID: LIB104-041-Q1-E1-G12
ggtccagaattcccgggtcgacgggttgtacagattttatgtgacagacaacaacctgcacggccgtctaccagctgatctgggaagaagccttcctagcatacaacagtttggatttggggataaccaattcactggagttgtgcctccatcactgactaatatctccagacttcagctttttgatgttggaaataacggattcagtggggttgtcccttcagagttgggaagattgcagtatcttagatggttttgtctggatgtgaacaagttcgaggcaaacaatgagcgagaatggcaattccttacttctttgacaaactgtagcaggctgcgactgatgtctatagaacaaaacaggttctcagggcaattgccaacctcaatatctaacttatccacaaacatccaagagctaagtattttggccaacaatatatctggtactatccc

SEQ ID NO: 6015 - DNA, 415 bp, Triticum aestivum
  Clone ID: LIB104-041-Q1-E1-G5
ttacaacaccctatagtgagtcgtattaagatcaacggactcgcgcttaaaagatatcttcattttccagcacgcttcggattcctggagcgttgcaagatcacgctcaagtccgtggagaggaacaagtcttgggaggtggaaggtgtcaactaccatccaggcaccaacaggtcttataattgtcttacgagaggctggaaggccttctgtaaggagaacgagctcaaggcaggagacatctgcaccttcaaagtcatcaagagcacgctgtggcatgttgtcatcgaccgctgctagaaatacggttcacagatgatcttggctgatggcggacctgctggttttgcgaacctaagtagtatcatgatgaatattgtggtgacatgataatcaacctgctaggagtttgtgt

SEQ ID NO: 6016 - DNA, 391 bp, Triticum aestivum
  Clone ID: LIB104-041-Q1-E1-G6
atagtgagtcgtattaagatcaacggactcacgcttaaaggatatcttcattttccagcatgcttcggattcctggagcgttgcaagatcacgctcaagtccgtggagaggaacccgtcttgggaggttgacggtgtcaccgaccatccaggcaccagcaggtcttagcactggcttacgagaggctggaaggccttctgtagggagaacgagctcaaggcatgagagatcagcaccttcaaagtcatcagcatcacgcagtggcatgtagtcatcgaccgcggctacaaatacggttcacagatgatcttggctgatggcggacctgctggttttgcgaacctaactagtatcatgatgaatagtgtggtgacctgataagccagctgcc

SEQ ID NO: 6017 - DNA, 183 bp, Triticum aestivum
  Clone ID: LIB104-041-Q1-E1-G8
attacaacaccctatagtgagtcgtattaatggcatgtcatgcgacttcgaaggtgtacggaatgttcacatgagtggccgtcgtcatagaacagtgatcatggggataacgctgaagtcagccggtgtggtcgctgtgcagcagaggctccgtgagctcgctggggcaatcatgaggaggcg

SEQ ID NO: 6018 - DNA, 430 bp, Triticum aestivum
  Clone ID: LIB104-041-Q1-E1-H10
ggtccagaattcccgggtcgacgggctcaactcactagtaataggttcatcataattggatctcttaaagatattagcaagtggatgaggatccataaacttttagcaatgaaagatgcaagcaaaaataaggcacatagtggcttctctcatgataacaagtattatggtgggtgaacaaattattgccgagcaattgatagaagagcgcattgttctgagaatatctaggcaatgattatgaacataagcatcacgtctgtgtaaagtagaccgaaatgattctgcatctactactattactccacacatcgaccactttccagcatgcatccagagtattaagttcataagaacagagtaatgctttaggaaagatgacatgatgtagagggataaactcaagcaatatgatataaaccccatcttt

SEQ ID NO: 6019 - DNA, 413 bp, Triticum aestivum
  Clone ID: LIB104-041-Q1-E1-H11
ggtccagagttcccgggtcgacgggtcgttcacgaaattagtctgattgaagaggtatgatttcgccgacgtgactttcctactgtcaggaaattgagtgccccgacggaattgagagttcaagtgtccggccattgttgtgctagcgccagctgtcaagtggatttttatcctgacaactgtcatgtccgaagcggcatttatgtcttattagcacgtcgggtcgcccctggctatacatagcccccctaaccatttgttggttggctgctccaagagagagattgacaagtatcaaaggagagcagcccatactctgacgagcttgaaaatccaagtatggaattccccaaccaaatccagagtgattaagcatcattgaagatattggcatgtgtagtcccacgcctatt

SEQ ID NO: 6020 - DNA, 366 bp, Triticum aestivum
  Clone ID: LIB104-041-Q1-E1-H7
tagtgagtcgtattaagggagatgacacttgaggatttcctggtgaaagctggagttgtcgctgacgggcatttgacggatccgattgacttgccagctaacatgggtgcggttgggagcagtgtaattgaggctgctgcgcccagtttgaaccccggagcgcattggttacagcagtacctggagccccagcatccacgcatggcaggtcctttcatggcaagtcatttgggtcctcagccattgtctgttgctacaggtgctatcatggaaccaatttacccggatggccaaattacgtcaccaatgctcgatgcgctttctgatcctcagacacctaggcgcaagcgtggtgcctcaaatggt

SEQ ID NO: 6021 - DNA, 417 bp, Triticum aestivum
  Clone ID: LIB104-041-Q1-E1-H9
taacggtccagaattcccgggtcgactgccaccaaaacgatatccatcatctcatcgaaagacgggacacctttgcctctatcaaatagctatcactacatgcatatttggctggtggaaaagctttatggtcatagtattttgcgaaaagccaatttttcctactacaaaggaatataatttatttaactacaaagttggttgaaaatattgagaaggttcctccaactcaatcccaaattaacatcaataacccaacaaattatttaagtaacgtgatgagatcaatatgataatccaagaaccagatactcaagattgtccataaccgggaacacggctaatcatgattagtttgtacactctgcagaggtttgcgcacttttcccacaggactcaattaataagacatgacta

SEQ ID NO: 6022 - DNA, 424 bp, Triticum aestivum
  Clone ID: LIB104-042-Q1-E1-A1
gtaccggtcctacattcacgggtcgacggggatccggaagacggaggcgaacgaggaggcgaagctgagctcgttccagcaggagatcgtgcagctggcggcggtgctgaacggcgaccaccagctaagcagcctgcaggagaggatcagggagaggatgaacgtgagggaaggcacctcctacatgaggagcgccgtgcggcgcttcttcgaggctggcatgtctgccaagaggatgggcctcgccgacgacgagcagatcgtcaagatgaggccctcccttaccaccagaatgacctcctcccctgcagatcaagatgatagtccgtagagggcacagaccgacgcatacataccatacataggatgaagattgatgttgggattaccaaaattcctagtactacacatacatacatagaag

SEQ ID NO: 6023 - DNA, 381 bp, Triticum aestivum
  Clone ID: LIB104-042-Q1-E1-A6
attcgcgggtcgacgggtctacgtatatcggtaactttacttggagctatatttttattcgccacatgatatttgtattgcttggagcatcttgtatgatactagtctttgcttattagtttaccacaatcatccttgctgtaaacaccttttgggagaaacccacttgattggaatttattagaatactctatgtgcttcacttatatcttttgagctagatagtttttgctctaatgcttcacttaaatcttttagagcatggcgatggcttaattttgtagaaattgatagtctctcatgcttcacttatattatttttagagtgtcttagaacagaatggtatttgctatggttataaaattggtcctagaatgatg

SEQ ID NO: 6024 - DNA, 396 bp, Triticum aestivum
  Clone ID: LIB104-042-Q1-E1-B7
acggggttaggaagaagtggggtggtggtgtcatgggctccaagtcgcaagcgaagaccaaggccagggaaaggcttatcgcaaaggaggctgcgcagcggatgaactaagtttagcattgttgaaccatatctattcctcatccttgagtagtgttcaagcatactgtggctgtttggctccagttttggaagtcatttttgtttgtctgagacatcttggaaagaacagtgtaagaatgaagtatttctgtttaatgccagttagtatttttgtcgaaaaaaataaaattcaaataacaaaaaaggataaaaatcagaattcccaaaaaaaaaaaaaaaaaaaaaaaaaaaaaagcggccgctctaaaggatccaagcttacttacccgtgcat

SEQ ID NO: 6025 - DNA, 435 bp, Triticum aestivum
  unsure at all n locations
  Clone ID: LIB104-042-Q1-E1-C7
attcccgggtcgacgggatggtaaatgttgtgtgacaaatttgaagcatggggtgttatttgattgctttccttatgagtggtggtcagggacgagtgatggtcttttcctaccaatctatccccctaggagcatgcgcgtagtgccgaggtttttgatgacttgtagatttttgcaataagtatgtgagttctttatggctaatgttgagtccatggattatatgcactctcacccttccatccttgctagcctcttcggtaacgtgcattaccctttctcatattgagagttggcgcaaacttcgccggtgcatccaaaccccatgatatgatacgctctatcacacataagcctccttatatcttccccaaagcagccaccatacctacctattatggcattttcatagccattcnaggatatattgccatg

SEQ ID NO: 6026 - DNA, 242 bp, Triticum aestivum
  Clone ID: LIB104-042-Q1-E1-D12
cggggataggagatgtaaatatgcattgttgtatcgcgacctgaatgaatggaataaacgaaataacgctgttgttcaaaaaaaaaaaaaaaaaaaaaaaaaaaaaaaaaaaaaaaaaaacgaaaaaaaaaaaaaaaaaaaaaaaaaaaaaaaggggccgctcaaaaggatcaaagctaacgtacgcgtgaaggcgacgtcaaagctcttcaagagggtcaccaaaattcaattcacggggg

SEQ ID NO: 6027 - DNA, 272 bp, Triticum aestivum
  unsure at all n locations
  Clone ID: LIB104-042-Q1-E1-E8
attcncgggtcgacgggtcataggacagtctgaacgaaacgtatccggatttcaaggtgacttagcgtaagagtttgccagcctgcacgaacgatttcggaaagcaatgcttcttttggcgaaggctttatggccatacgattctcctcctgttctactcccgtgagctcgcgggactattcaactgaccacaccgtaattatgccctgtcgaatcgtattctcatctctacatggtgcacgagacgactgtgccatgatcaaaatccggta

SEQ ID NO: 6028 - DNA, 405 bp, Triticum aestivum
  Clone ID: LIB104-042-Q1-E1-F6
attcccgggtcgacggggaattggattggctttcccacttgttttttttccttctataagttcagtgtgtggcaaaagcttttcttttcaaatttttctttttgaggaaattttcttttcaattttgggcgaagaccgaagagcggcggcaactataatttccagtgctagcatctgtaaagtatcaccaaaatatgcatctccattcactattgtaagatgttctttctcctttctgattgagatgtatgtagacgaattttgacgtgattgttcattcaattcaatatatatgtaatctatattataaaatatattatatttgtgagcagagggagttgcagtttagatactccctccattcacaaatataagatgttctaacttttgtctgaattaggtgtt

SEQ ID NO: 6029 - DNA, 414 bp, Triticum aestivum
  Clone ID: LIB104-042-Q1-E1-F8
aattcccgggtcgacgggccatcacacgccctacttgctggttttcccgtgatatgtagaaattcgcttcttttcttgactctacttgattgtttttcctaattggctggtcatcatctgatttgtgcctcagatcctagcttacgttcaaccatggtctgtaagcacatggtttcttatctagtttccgtatttatcttttgatgatgttggttgttcactattttgaaacatgaataactttttactgacttcgatctctctcatatactacatgattcagcttcacgattttcttcatactatcttatgaaaatgtaacaaacacatttttgaaactttttaacattttaaaaaatgtaacgcacatttttaatatatgacactatttctattatgcaaatatattttaca

SEQ ID NO: 6030 - DNA, 434 bp, Triticum aestivum
  unsure at all n locations
  Clone ID: LIB104-042-Q1-E1-G3
gggtcgaccgggtgacgtagcgcgagcaggttggtcggagtgaggtggctgcgggcggcggacatgtccgttccgatccggacgtgtccggcggcggagagggagcggggctagggttggactgcgcgaaaaatcccgaggggatcgcatatttataggtagagggagctangagagtccaaatgaggagcggttttcgcccacgcgatcgtgatcgaacgaccgagagcgtggaggggagttagatgggttttgggctactttggaaggggtgttgggctgcaacaaaagaggccttttacggttacccggttaaccgttggagtatcaaacgacctccaaatggcacgaaacttgacaagcggtctaccggtgctataccaaggccgcttggcaaacctcgggtcattccgagaaagttaacacccgctcac

SEQ ID NO: 6031 - DNA, 435 bp, Triticum aestivum
  unsure at all n locations
  Clone ID: LIB104-042-Q1-E1-G5
gtaccgatcaagaattcccgggtcgacggggtatgctataaagaataaagataaccatgaaaattgtcatcatgattttaattttcaattggagtatgcttcacattatagttattttgttgagtttgctcccactactattcatgagaaaaaatttgcttttgtggagagtaataaaatttctatgcttgtagatcatgaaaagaatgctttatgtgatagttatattgttgaattcattcatgacgctattgaaaattattatgagggaggaatatatgcttgtaggaattgcaataatttcaagtttcctctctatgttcttaaaatcgtgaagttatgcttgttttgccttcctatgctagttgattattgttcncataagttttttgctcacaaaatccctatgcatangaagtgggttagacttaaatg

SEQ ID NO: 6032 - DNA, 434 bp, Triticum aestivum
  Clone ID: LIB104-042-Q1-E1-G7
taccgatcaagaattcccgggccgacgggattcaataatctatttatgttatccagaacaaaagtacttcacacacttttgtgttttgtctaattgcaggtgtatgggacatttgtacaatccacatatgaagataggggaaaaggagaagtttaggttctgttcaaaaagtcctctcacgtcacttttgggccaagagaagatagagtccatgtctctcacgttctggattcagattcgaactgcacagacatacctgactcaaaacgccaacaactttttcatacggactccgaattgggtgattctttctttgttggaaagtagatttcatactctttccaacccaattggattcacctttaaattcgtccggagcgttgagatatggacgaaacaatctgacgctgcagcagaatctgagtcaaacaaca

SEQ ID NO: 6033 - DNA, 447 bp, Triticum aestivum
  unsure at all n locations
  Clone ID: LIB104-042-Q1-E1-H7
gtaccgatccagaattcgcgggtcgacgggaaaccctagaagctagcctatggtatgattgttgtcgtcctgcggactaaaccctccggtttatatagacaccggagggggctagggttacacacagtcgattacaaggaagaagatctacatatccgtattgccaagctttccttccacgccaaggagagtcccatccggacacgggacgaagtcttcaatcttgtatcttcatagtccaacagtccggccaatggatatagtccgactgtccggagaccccctaatacaggactccctcggtagcccctgaaccaggcttcaatgacgatgagtccggcgcgcagatttgtctttggcattgcaaggtgggttcttcctctgaatactccatagaagattttgaacacaaggatagtgtccggctcagcanaacaagttcacata

SEQ ID NO: 6034 - DNA, 451 bp, Triticum aestivum
  Clone ID: LIB104-042-Q1-E1-H8
aaaattcccgggtcgacgggaggtgtaacttcttctaatggaggttccagaaacttctagagccttccacaaccctccagaggttttctagggttgtcctaaactttttggatctccgctttttctcggtttccttcataacattttcttttcttccaaaacttttctggtgcaattcacataagctcttgcacttctagtactcaacaaatcgatgatccttaagcgtgtgtcctggcaggttcggtaaatgtagacaagacccggaacaccttccggtcaatggccaatagcagaactgtggacatccatattgtcccccctacacttacacgaattattatcgagtgaacctattgttctgacacacaattccctttatttcacaatataacataatcaaaggtgatacttattggtatccatgtgaagcaactcatgatcaccatac

SEQ ID NO: 6035 - DNA, 345 bp, Triticum aestivum
  unsure at all n locations
  Clone ID: LIB104-043-Q1-E1-A1
gggtcgacgggcaccaacaatccattctttaaatgtagacacaaagaattcgttgtttttaacagaaggacattcttcaaattgtttttggtttaaaaaatgttcaccattttaatattcaatatttccaaaaaggtatcagaatgtttcaaaaaaatggatgcatttaaaaatattcttattttaaaaaaaatctaatttcttttaaaaagcatgtattaaaaaatgtcagtcttaaaaaaccattttataaaaaagaaaatattaatatattttcaagaagtanaaaataaaatcaatgttgcgtaattgcacacacaaagaagattttnggtttttttggcc

SEQ ID NO: 6036 - DNA, 402 bp, Triticum aestivum
  Clone ID: LIB104-043-Q1-E1-A6
gtacggacaagaattcccgggtcgacgggaagatctagctgtctgagctgacggatgcgctgcggacgctggggtcgacctccgcggacgaggtgcagcgcatgatggcggagatcgacaccgatggtgacggcttcatcgacttcagcgagttcatctccttctgcaacgccaacccggggctcatgaaggacgtcgccaaggtcttctgaatcagttcatttcacctcagccgtccgatccaggagccgatccatctacgtacggcttcgtatatcaatttcatgcaactacctactccggtcccgattcagcctcagcttcacctgaggccggccctaattttgtttgatcaatttttttgctactagtagtaactagtgatgatcactgttgcaccat

SEQ ID NO: 6037 - DNA, 415 bp, Triticum aestivum
  unsure at all n locations
  Clone ID: LIB104-043-Q1-E1-A8
attcccgggtcgacggggagtatcagcaactgcgatcaattcatttatccgtggaattgggataacgagaagtgacaatagcttaatccgtgttgaccgtcttgaatatcatatcagagaagaactgaataaaacagcttctcggaccatggttgttttgcatcctctgaaggttgtaataactaatttggaagatggaaaagtcatagaccttgatggaaaaaagtggcctgatgctcctgctgatgaagcttcgtcctactacaaggttcctttctcaaaaaccgtctacattgaaaaaactgattttcgcgtgaaggactccaaagattactatggattggctcctgntaaatctgccctgctgaggtatgcattcccgataaaatgcacagaggttatttatggtgataat

SEQ ID NO: 6038 - DNA, 406 bp, Triticum aestivum
  Clone ID: LIB104-043-Q1-E1-B6
gtaccggacaagaattcccgggtcgacggggcctctgaaaacgctcagcgagaacgggaggggagaggaatgcgacgagagctcgatgtagcatgcacggaccagagagagccaaggggacacggggacgaagaagatacaggagggaaacgacggccggctacagcgcgttcgtgggcgcacggtgacgagcgccagcgaggaggcttccagagggggagatggctctaggaggacggtgacgacgccggaaacatgctagacatgggcatacggtgaggggatgagtgcatagatggggaggaggagacagaagcgccagagcgcgcgggtgacatgccaaaatggtggtcaccgcgtggacacgaagctaacccatgctctgatcggacaaatcatgtctggg

SEQ ID NO: 6039 - DNA, 374 bp, Triticum aestivum
  Clone ID: LIB104-043-Q1-E1-B7
attcgcgggtcgacggggaagaagaaggaggccctcgagaggctaggcgccgacggcttcgttgtcagcaagaacgccgacgagatgaaggctgcgatgagcaccatggatggcatcataaacacggtgtctgcaaacatccccatggcccctctcttcgggctactcaagcccaacggcaagatggtcatggtcggcctcccagagaagcctatcgaggtccctccctttgctctggttgccaagaacaagaccctggccgggagcttcatcggcggcatgagggacacccaggagatgctggacctcgcggcgaagcatggtgtgacggcagacatcgaggtgatcggcgccgagtacgtgaacacggccat

SEQ ID NO: 6040 - DNA, 366 bp, Triticum aestivum
  Clone ID: LIB104-043-Q1-E1-F9
gcgatgattttactggactgcttgccggactgtcgcagcgaggaccgaggtatgtatatgccatatagcactctcgatgcaacgaaagttacgtcccttacagttttcagcatcatgaccgcgtgccagattttgacgaagggcagtgtttgcatgcactcgcaatgtgacattacattcacatctgtcccaaaaggatcaacatcatgaccatcataatcgccgtgctctccgagtaagttgtcggcaggaacaaaccgaacctcgcaatcataaaaaaagcggccgccccataggatccaaccttacgtcaccgagcatgtgaagtcacagctcttcaaaagggtcacctaaattccattcatg

SEQ ID NO: 6041 - DNA, 454 bp, Triticum aestivum
  Clone ID: LIB104-044-Q1-E1-A10
ggtacagtcaagaattcccgggtcgacgggtactctaagtgcttcacttatatcttttgagctaggcaatattgctctagtgcttcactattatctttttagagcacgacagtggttttattttatagaaattgttgatctctcatgcttcacttatattattttgagagtcttctagaacagcatggtaatttgctttggttataaaattagtcctaatataatgggcatccaagataggtataaaattagtcctaattttcatataaagtgcattgaatactatgagaagtttgatactttatgattggtttgaggtatgaagatggggatattagagacatgccagtggagttattgtgaatttgagagatacttgtggtaaagtttgtgattcctgtagcatgcacgtatggtgaaccgttatgtgatgaagttggagcatgatttattt

SEQ ID NO: 6042 - DNA, 393 bp, Triticum aestivum
  Clone ID: LIB104-044-Q1-E1-A8
taccggtccagcattcccgggtcgacggggaaacctatgtacaacatcaatatggctagcctagacgactaggttccccatccaggttcaagtcctaaacttgacatgggtgctctcgtagaaggtgtgtgcgcgtgttgtgagcgtctgcgtctgcattgtgtttctaaagaaaaaaaaaatctggctgccgatcgacgggtgaagaaatgccaagacatcatcttgttgcaaataccccaccccactctctgcgagattcgctaagttcgttgtgcattacatactggaatgcgttagttacctagttacgatcgcactagaacaacatttgtgtactgagtattcggacaaagtttgtttttaaagtgggcaacttttttgttatgatcc

SEQ ID NO: 6043 - DNA, 429 bp, Triticum aestivum
  unsure at all n locations
  Clone ID: LIB104-044-Q1-E1-B10
attcccgggtcgacattccgtgtcatgctctccgtagcagcatggagcaaactctcaaaagacgcgtgccatgcaagtgtccgttgttggttgggaaaagcatacgcatcaatgcatgcatgggatgcacacaaactttaaatgcgtgatcagtggtcatgtttatcttactgtatgtcacaacgtgtactgtagaaattcattgccttttgtttttcacatgggtcggccatggctatatttctatgaaagcgttgaaatgtgatttctttttgtatcacacggctaggcaatgatgcatacacgaatggtaattcactggcatgaagacatgggtactgcccactaggactacacgtgtcgaagttaagtctgtcattctgcangggtcaacggtgctcagatcaaatgttcatgtcaccatgacgt

SEQ ID NO: 6044 - DNA, 435 bp, Triticum aestivum
  Clone ID: LIB104-044-Q1-E1-B12
attcccgggtcgacggggaagaagctcgatccgacgggaagcctcgacgccaccgctgtacatagagaggagaagcagagcctgagagtcagtcagcgaagcttgccattcgaccgtccatggaagcactctgagattcaacctaacagtgttgggcccttagcagtgtcttagctttctaatttccaccaatccatccgtcagtcccttccggtgtaatgattcttttgaacaagaaagggaacccggccgtgcaacagtagtagcttaggctagctctgcgtatcatcatcatcatctcctttcttcttgtgctaagcttccaagatcgatcggtacatagcgcggcacccttcctatccattctccctcaaatgagaggggattgcattgaagatgtgtaatagtatcatttgtattgccattatatatata

SEQ ID NO: 6045 - DNA, 404 bp, Triticum aestivum
  unsure at all n locations
  Clone ID: LIB104-044-Q1-E1-B2
gggattcaaacaaaaaaaaanaanaaaaaaaaaaaaaaaaaaaaaaaaaaaaaaaaaaaaaaaaaaaaaaaaaaaaaaaaaaaaaaaaaaaaaaagaaaaaaaaaaaaaaaaaaaaaaaaaaaaaaggggccgcccaaaaggatcaaagcttacttacccgtgaatgcaacttcaaaccccttcaaaagggtcaccaaaattcaattcacgggccgtcgtttaaaaacgtcttaacgggaaaaaccctggggttaccaaacttaatccccttgaaaaaaatccccctttcgcaaactggcgtaataccaaaaaggcccgcaccattcgcccttccaaaaatttgcccaccctaaatggcaaatggaaccccccctgtaccggcgaataaaccccgccggttttg

SEQ ID NO: 6046 - DNA, 433 bp, Triticum aestivum
  Clone ID: LIB104-044-Q1-E1-B6
taccggtctagaattcccgggtcgacggggcaagatataaaataaagtttagtttgagtttttactttctttactttcttgttgcaattaaaagaaaagaaagaaataaaaagaaaagaaataaacaaaagaaaagaaataaatcaagaagatcatatactaatcttatggtaggtgatggcaccacataaggaaaagtataagtagaaaattttattagagattgacaaacatagcattagtcaatgatgcaactcatgaaagaattaataagggaagagaatattcacatacaaatagactatcctacaaatcttttgtgattgtgagcccccatcagaatattatatgccagaattgttgatgttggacaaggaacacagcttaatgatttacgtttgttcatattcacatagaagacatattgtcatag

SEQ ID NO: 6047 - DNA, 438 bp, Triticum aestivum
  Clone ID: LIB104-044-Q1-E1-B7
attcccggctcgacgggtaccttagtattcaattcactcaaaagaaagtttcacatatcttgaacaccaagtatattaacattaagcaaattaccatgttattaaagactctcaaaataatctaagtgaagcatgagagatcaagtttctttaaaacaaatccaccaccgtgctctaaaagatctaagtgaagtactagggcagaaattatcacgctcaaaaagatataagtgaagcactatgagcaaattagcaagctcaaaagatataaggaagcacatagagtattctatcaaatttcaaatcatgtatggctctctcaaaaagttgtgtacagcaaggatgattgtggtaaactaacaagcaaagacacaaataatacaaaacgctccaagcaaaacacatatcatgtttgtgaataaaaatatagctccaagt

SEQ ID NO: 6048 - DNA, 430 bp, Triticum aestivum
  Clone ID: LIB104-044-Q1-E1-C6
taccggtccagcattcccgggccgacttccaccaaggacgatatccatcatctcatcgaaagacgggacaccattgcctctatcaagtggtatcagatttccaggttgctcggtgagattttacagtttttcgtagtttagatcgagtctgttcttcatacctacagtccacgaaaaagccacagaaaaaatttagggttagttcatcatatccgaaccaatctgagcctttgcatagtctttttagggttttgctttgttgaatttgcggttacatcgtcgtgtctagttgctggtcttagagtctagtcttttagagtttcgagttctggtcataagttgtcacgctgccgccgcaccatcatcatcgcccctgccatctaccaccaccgctccgaatccgtatccatatagcagcaccaatccgtgt

SEQ ID NO: 6049 - DNA, 452 bp, Triticum aestivum
  Clone ID: LIB104-044-Q1-E1-C8
gtacggtctagaattcccgggccgacggggccgacaatacgacgatcagggagtacaacatcatggccttcaaggaccacaggaaaaccttggagaagttcgttcaagagcacattgacctcgccgaagccgctgccacttcacgtccccctaccggacaagcagagtaaaagctcgattgccattattaacctagctagctgcaaagacgaaggagggttgttgatgtatcctatttggcttccttatgtagtttgctgcatcatcgttgtcgagccaagaacaactacttatgtatgcattagtgtattacgctacttgtcagcgatcgagtctgtcttaactcttgagtagtagtaatagttgctatcaagctgtgcctgtgcgcttgctcgctataactaattttgtacaacgtaatttgtttggcaccaagttctgttagtaataat

SEQ ID NO: 6050 - DNA, 403 bp, Triticum aestivum
  Clone ID: LIB104-044-Q1-E1-D11
attgccgggtcgacgggttaacctgagttcattcctcaattgtagaaacatctgcgatatattattgtaaccaccccatgcatgtctaacaacttggatgtattccaattgtattgtgtcttcgccagtccttagagagccatatttgctttaatcctcacatggttacaaccataatagaatgcaccctcagcaatatgtttcatcacattgcattaattaaccaggcaattaactatttacaacattttatgttccagtcattagtcaatcaccatattgcacattataacacactcctatgacaatgtcaactagttacacataccatacgttcgtaacaccttggaaatccaacaattgtaattgtttctcatgtacttgttgcaaccaaattcgattt

SEQ ID NO: 6051 - DNA, 185 bp, Triticum aestivum
  Clone ID: LIB104-044-Q1-E1-D4
ttgtggaatcgagtgagcttatcttttgaaatttctggcaaaaaaaaaaaaaaaaaaaaaaaaaaaaaaaaaaaaaacaaaaagataaaaaaaaaaaaaaagcggccgccctacaggatccaggcttacttacgcgtgcatgctacatcatatctcttctaaattgtcacctaaattcatttcaa

SEQ ID NO: 6052 - DNA, 409 bp, Triticum aestivum
  Clone ID: LIB104-044-Q1-E1-D6
attcccgggtcgacgggaaatcgaagagatgagtggcgggaaacggtagcgtgtttggatatataacaacattaatatagaaaacttagtagagaaggaagcactagcacaacgcatgctcacagtgcttacccatatactgcatgtgctatcgaaagggatgatgattgtcgttcgatctgggagcatccaacggtgtatacgtacgatccgtggggtttgggttctcgccaatcagaacgcacgacccagatcacgcgcgcagcaggagggggacatcggccacggttttgtaggcacacggctttcgtgagtgaaccgtgtgctatttgaaaacattttatgagaagaatctcggtttttaaatccccgtaaatccaaaactcacccgagaatcgtgacatggcca

SEQ ID NO: 6053 - DNA, 324 bp, Triticum aestivum
  Clone ID: LIB104-044-Q1-E1-E12
cgggtcgacactgaagaaggagggctggctgtcaaccccaacttctttgttgatttcgggaccgagcctgaaggtccctccttggcccatgagatgagatatcctggtggagactgcacctctgacatatggatctaggaggaagggtgtaggacacaggcagctggagatccatggtgttgagctcactgtaattaaaatggtctcttccccgcctgcggtgttgtatgtgatgtggtatcaattggaataagttcctgatagaacctctgacattggcttcatgggagctttgggccctaataagagttgcctctgattctg

SEQ ID NO: 6054 - DNA, 425 bp, Triticum aestivum
  Clone ID: LIB104-044-Q1-E1-E2
taccggtccgaacattcccgggtgcccgggcctgttacactgtactccctccgtccggaaatacttgtcatcaaaatgaatagaaggggatgtatctagagtatttccggacggagggagtacatgtcaacatgttgtgtgatattctcagctaatgctggagtgacagcggttcctggggagatggataggacgactggtctctcaagctctttcaggatctgcaaaacgcaatgtgaatttcccatgaattgatctcaacagattgccaattgtgatgtagtagctaattctagaatggagggctacattaattaattcaaacctctgaaacggccacgatttccttcgggctataatccgtgccaaagatgcaatccaactttactgcaaattgaacaatttggtgcatcatgttaccgttg

SEQ ID NO: 6055 - DNA, 403 bp, Triticum aestivum
  unsure at all n locations
  Clone ID: LIB104-044-Q1-E1-E5
tcccgggtcgagcgggggggacgagagtagagaggggggaaaggacttagcgaaattttgagcccgggctgccgggatttgagtcagactagcagtagcgcgttttgccgaagacgtgctatagcgaggagagctatagcgtgttccagcgaaatgcactacagctattcctttctgtttgatttttcttttgttttcgttacagttttatttgtttcatttcgccttttgataggtctttcatttgcagttacttttctacttattttgcgatttattggcttgggcatagcagtagggctctacaggatgagcgtgctgcgagagagtggttagcagtanggggcttctgggtgaagcgctaggacggagtcctagcctaccggcatgagtgagggaattt

SEQ ID NO: 6056 - DNA, 403 bp, Triticum aestivum
  Clone ID: LIB104-044-Q1-E1-E7
gtaccggtccagcattcccgggtcgacggggaggcagagacagagaaccgcacagcggcggaaagactgcctggtgccggagaagatgatggaccggactcaaacaagacaacgtcggaagcagctacctcacggtagcaggcgactgattgtctgctgccaacttggcatgtgactgaacatgtataaaataggattatgagttgacaaaggttcaccgcacagggtgtatactggttcattctacaattattttggtaaaggtttaatgatcttttgctaaaaaaaaaaaaaaaaaaaaaaaaaaaaaaaaaaaaaaaaaaaaaaaaaaacaaaaaaaaaaaaaaaaaaaacaaaaaaaaaacccaaaaaaaaacccaacaaacgaaaaaaaaagcggccc

SEQ ID NO: 6057 - DNA, 438 bp, Triticum aestivum
  Clone ID: LIB104-044-Q1-E1-E8
attcccgggccgacggggtcacatatttcgtgagtctatgctcatgaccgcactaacaacacactaacggtttggatatttgatctgaggggcctctggcccgatagcactaaccatcacgtgggcatagtatgggcattctgcgtcgtatgcatcagccgaagcttaatagacgtcatgcgactgagcggcgcgcgccgggttggacttgtaagctcccgcctttttttaaggaggtagctaggtctgctcaccggccgcccacgcaacgtgcaggagttcccggggcgatggcccatgacccctgggggcataggtttagtccggcgtgcttgacctctctattaagtctaggtcgggttgcggcgtattgtttggacgaggccgggcatgacccaggaaagtgtgtccgaccggagttaatcgagcgtggtgggt

SEQ ID NO: 6058 - DNA, 440 bp, Triticum aestivum
  unsure at all n locations
  Clone ID: LIB104-044-Q1-E1-G11
atgcccgggtcgacgggtattcggaatttggagaagaacccgccttgcaatgccgaagacaatctgcgcgcaggactcatcgtcattgaatcctggttcgggggctactgagggagtcctggattaggcggtccttggacagccggactatatcctttggccggactgttggactatgaagatacaagattgaagattttgtcccgtgtccgggtgggactctcctttgcatggaaggcaagcttggcaattcggatatatagatcacctcccttgtaaccgactttgtgtaaccctagccccctccagtgtctatataaaccggagggtttagtccgtaggacaacgaaaatcataatcataggctggcttctanggtttagcctctacgatctcgtggtagattaactcttgtaatactcatatcatcaagatcaatc

SEQ ID NO: 6059 - DNA, 245 bp, Triticum aestivum
  Clone ID: LIB104-044-Q1-E1-G5
taccggtccagaattcccgggtcgagcgggaaatacacacccaccctacctaaattcaggtagaatacaatacatttggtattggggcatgcttgtatcgatgcctatgcaagcgttgtaacctgtaaaccgacatactgaaaatgcgaggaacgttaagttaagaaggaaaaaaaaaaagaaaaaaaaaaagggcagagacgcgaaaagagaaaaagcaagaagaaacgatacatgcaacgtca

SEQ ID NO: 6060 - DNA, 370 bp, Triticum aestivum
  Clone ID: LIB104-044-Q1-E1-G6
cgggtgagttgcgttgcttggttaccttccggcgttgagagttttgtttcttaggctggcaacgtgaacatcaagcgttgctgaatatgtgcctgcggctgctgttgtatgtagtagccacacattataattatatgggatgttccattgtcttgttcaccaggttatgaggctttggccagggttttagctgcagtttcgattttcattgacaaagaaaaaaaaaaaaaaagaaaagacgaaacagaagaaaaagtagaaaaggaaaacgggagaaagaaaaaaaaaaccggccgctctaaaggatccaaccttacttagccttggatgcgacgtcagacctcttcaatagtttgacctaaattcagtt

SEQ ID NO: 6061 - DNA, 445 bp, Triticum aestivum
  Clone ID: LIB104-044-Q1-E1-H11
aattcccgggtcgacgggtggacgccggtcgtcctcccatagaagcaattatgtttaatcaagaagacataatgcgtttacaatccttagatcatgttgcttataatgaaaatcttagaaagagggttcctaccgatattctagttgatagaatttctgaacttaatgataattttgatattcaaaacagcgggttgggttttcctcttgaacaaaggctcatgactttttgccaaatgaatgcgtacaatgatgagttggttgtacaatatgaagggccaaaggaggaaacaattcatcccgagcttgatcatgggggacttttgtccattaaattttgcccttttgattactttttcttatctcaaaaaaaacttgctgctgaacgtagggagtacgagatgagttttcaagattttccctatcattattatggcaataccta

SEQ ID NO: 6062 - DNA, 253 bp, Triticum aestivum
  unsure at all n locations
  Clone ID: LIB104-044-Q1-E1-H3
taccggtcctatattcncgggtcgacgggaagtagaacaaggccggtttcgaaggaagttatacctgagggtccccgggatgtcgttaggtgggcggcggaaggccggatctgccaacacaacggaaacaaggaaaaaggggcaaaaaaaaaaaaaaaaaaaaaaaaaaaaagcggccgctcaaaaggatcaaagcttacttacgcgtaaatgaaacttcatacctcttcaaaagtgtcaccaaaattcattt

SEQ ID NO: 6063 - DNA, 442 bp, Triticum aestivum
  Clone ID: LIB104-044-Q1-E1-H9
cgggtcgacggggtagttccctttgtcatcggtatgttacttgcccgagattcgatcgtcggtatctcaatacctagttcaatcttgttaccggcaagtatctttaatcgttctgtaatgcatcatcccacaactaactcattagtcacattgcttgcaaggcttatagtgatgtgcattactgagagggcccagcgatacctcttcgataatcggagtgacaaatcctaatctcgatctatgccaactcaacaaacaccatcggagacacctgtagagcatctttataatcacctagttatgttgtgtcgtttgatagaacactaagtgttcctccgatattcgggagttgcataatctcatagtcataggaacatgtataagttatgaataaagcaatatcaataaactaaacgatcatagtgctaagctaacgcactac

SEQ ID NO: 6064 - DNA, 160 bp, Triticum aestivum
  Clone ID: LIB104-045-Q1-E1-G1
attgcatgcacacatatatacgaccaataaaaaaaaaatgaatattttagaaatataaaataaaataagaaataaaaaagcggctgctctagaggttccaagcttacgtactcttgggtgggacgtcatagttcttctatattttcacttaatttcaatt

SEQ ID NO: 6065 - DNA, 376 bp, Triticum aestivum
  Clone ID: LIB104-046-Q1-E1-A11
ggctgaccactgggcgcctactaacaccaacaggcgcacctgacgctataccgtgtgttttcaatcaagaagcctggaaaaaacgctgctgcaaaaggcaaaacaacggctagggggtggacttgtagactgggatgtatcccaacacgtggagccgcggacaatgcgtacgtgcgtgcacacacacatgtgctgtacatgtgatgaatactgaataatcgagtcagatgaccgcctgtggtcgtcgtctcgaccgcctcgtacatgtagacgttgcacaacacctgtacatgtgattgaataaccgaaaaaaaagaaaataaaaaaaaaaaaaaaaaaaaaaaaaaaaagcggccgctctagaggatccaagctt

SEQ ID NO: 6066 - DNA, 267 bp, Triticum aestivum
  Clone ID: LIB104-046-Q1-E1-C2
tgcgactgcgtccgcgattgcgactgggaaatgagcccggatgtccgcagtcagattacatcactcaagcggcatgtactcacaacacagcaggttcaaaggattgaagaggaactgggagatgtactccgccgtccagtcttcaatagcaagctgatgcaacctgagattgttgtattaagaaaaagcggccgctctacaggatcaaccttacttacgcatgcatgcaacatcataattcttcgagatcgtcactcaaattcaatt

SEQ ID NO: 6067 - DNA, 141 bp, Triticum aestivum
  unsure at all n locations
  Clone ID: LIB104-046-Q1-E1-D3
caagtaggaaggatcttatgttggtacaaaanannnnnnnnnnnnaaaaaaaaaaaagcggcggctccaaaaggttcaagcctaacttacccttgaaggcaagttaaaactcctccaaaagggccaccaaatttaatttaa

SEQ ID NO: 6068 - DNA, 441 bp, Triticum aestivum
  Clone ID: LIB104-046-Q1-E1-E11
cggtcccaaattcccgggacgacggggcaacatgactcgcatcctgcactgcgacaaggaactgccgccggagtgcctcaatatgtacatctcccaaagctgcctcagcctggcaccatgtacacaggtggattgtcacagggcatgttggatcagatgcgtccatatgcacccgtgacccaggccaaatccgggtccaactgccggcggagtctccaagtcgggtccatcgccatgacctgctactcccatgctaccgtccctgtcacccatgccgcctgaaccatgccccactgatgccacctaatgcgcccaagacaaagccgatgccgccgtgcccgccactagctgtatccgcgtcgagcaacaccagcaacaactgctgggtgtacgtgacgacgtctatgcacacatacttccaagtgaacacgccatattttc

SEQ ID NO: 6069 - DNA, 424 bp, Triticum aestivum
  Clone ID: LIB104-046-Q1-E1-E9
attcccgggacgacggggaggctgaaaagctgattggcaggatagtgaagtggctgaagcccggtgggcatattttcatcagggaatcgtgcttccaccagtctggggattccaagaggaaagtgaacccgacgcactaccgggagccgaggttctacaccaaggtgtttaaggaatgccacttctatgaccaagaggggaattcctttgagctttctctggtaacttccaagtgcattggagcttatgtgaaaagcaagaagaaccagaaccagatatgttggctgtgggagaaggtcaagtgcacagaagacaaaggctttcagagattcctggacaatgtgcagtacaaatccactggaatcttgcgttatgagcgcgtatttggggagggttatgttagcaccggtggattcgagaccac

SEQ ID NO: 6070 - DNA, 383 bp, Triticum aestivum
  Clone ID: LIB104-046-Q1-E1-F5
gggtcgacggggcatcccatctttcgtcttcgtctatcggtaactttacttgaggctatatttttattcaccacatgatatgtgttttgcttggagcgtcttgtatgatttgagtctttgctttttagtttaccacaatcatccttgctgtacacaccttttgggagagacacgcatgaatcatgatttattagaatactctatgtgcttcacttatattttttgagctaggcaatatcgctctagtgcttcacttatatctttttatagcacggcggtggttttattttatagaaattgttgaactctcatgcttcacttatatcattttgagagtcttttacaatatcatggtaatttgcttgggttaaaagactaatcct

SEQ ID NO: 6071 - DNA, 151 bp, Triticum aestivum
  Clone ID: LIB104-046-Q1-E1-G7
gggtcgacggggaccacaaaacggcggaggagcacaagaagaaggacggggagcacacgaacgacggctatgcacactgagggcatcatggataagatcatggacaacatcagcggctaccgccacggttacggcaagaaggactgcgacc

SEQ ID NO: 6072 - DNA, 176 bp, Triticum aestivum
  Clone ID: LIB104-046-Q1-E1-H2
atcactttgccctcaattagaaagaaatttccggtaaattcaagttcctaaaaaaaaagccaaaaaaaaaaaaaaaaaaaaaaaaaaaaaacgggccgcccaaaaggatcaaacctaacgtacccgtgaaggcaacgtcaaaccccttcaaaagggtcaccaaaattcaattcatg

SEQ ID NO: 6073 - DNA, 444 bp, Triticum aestivum
  Clone ID: LIB104-046-Q1-E1-H5
attcacgggtcgactgcggagttgatctcggatgtgtacagaataattcctcgctatcaggtggtaataacgcaccggaacggacgctgttcttgatgcgcggaatggcaaggcaaagcattctttcaccgagcaatggtgattgacgacttgattacagacaagatagatttggcacattcttacctgtaaagataatttgccaaataaagccgtttataagctttgccactttgataatctcttgtactgacacaatttgaaagaattcctttgaaaaaaaaaaaaataaaaaaaataaaaaaaaatgaaccttaagcaaaactacgtaaaaaaaagttagaaccccctcatgaagatcaattataaaaattatcttagaatgccaagaaatggctgctacaattgggacaccaaaatctcggtaaacaaaaaggggggggc

SEQ ID NO: 6074 - DNA, 467 bp, Triticum aestivum
  Clone ID: LIB104-046-Q1-E1-H7
gtcgacgggagactccagtggaacatttggcgatcctggtggtcttgtcacggctcggacgcacgcatttgacgtgcactacatcaactacgattgatgtcaccgtagatctgtaacatgaatttgggtcagatataagggggaagtgacaatatgaatcaataccaaccttgtatacttgttacccttattctgattgcatgatggttcaatgcttagtgcattcccaataacatgcaacgtatggtgaaccgttatgtgatgaagtcggagcatgatttatttattgattgccttccttatgagtggcggtcggggacgagcaatggtcttttcctaccaatctatccccctaagagcatgcgcgtaatactttgtttcgataactaaaagatttttgcaataagtatgtgagttctttatgactaaagttaagtccatggattatatttaaacacacccttcca

SEQ ID NO: 6075 - DNA, 399 bp, Triticum aestivum
  Clone ID: LIB104-047-Q1-E1-A1
cggtccagaattcccgggtcgacggggaaaggggggaatggaggacttagcaaaatattgagccagtgggtggttaattcagaagtagcagtagcgcgttcaagaaagcacgctactgctaagttagctatagcgcattctggtatacacgctactgctactcctttctcttttttccctttttcatttatttttcttcacattttattttttcctttcaccttattcgatttctttcattctcaattacctttctatttgctttcaatttaattttatatcctttagcagtagcgagtttagaagaaaacacgttgctacaaaggacgtagcggtagcgcggttcaatatggatcgctactactatgtgtagcctatcggctaagccgtgggaataat

SEQ ID NO: 6076 - DNA, 427 bp, Triticum aestivum
  unsure at all n locations
  Clone ID: LIB104-047-Q1-E1-A2
cggtgcagaattcncgggacgacgggtcgccttgaggtaacagaattaagtttattagaatgaagatgtaaaataggaggaaaagtgcttacagatcgcatccaggtgctgcagaaaacagtggttaaacttatttagtatagcatttatttgaggcacttgggcctaatattgaaatattaagatagagatttaaattatgtactcttgttttgtaaacactatcttgcaattgcttcgtggaccatgggagggatgattcctagaagccatgttttccaataatttcaacagctctgtgttaagtagcttagttattaatttttatttctgtagtataatcctgggaggttgctggaccaggaaacataatctcatcggtaatttcctaaggaaaatattaggggttctctgttgtgaatttttt

SEQ ID NO: 6077 - DNA, 237 bp, Triticum aestivum
  Clone ID: LIB104-047-Q1-E1-A3
gtgtccattgggttcagctcgatgaaaataggaatggttaagctcaaaattgaacaattcatccatcaaagggtgccctttgatggataatttgatagaacaacactatggaaaaaggttgtgaaaaaattttcaaaatatcaaattgaaaaaaatcggccgctctaaaggtttcaagcttactttcccgtgcatgcgactttttacctcttctaaagtgtcccctaatttcaattt

SEQ ID NO: 6078 - DNA, 393 bp, Triticum aestivum
  Clone ID: LIB104-047-Q1-E1-A8
attcccgggtcgaagggtatctcaactactacttctggctgtgggcggggatcggcgcggtgaactttgttgtgtacacggcattcgccaagaattacacggtgaagaaagtcgagccccggtgaacacggtttgctgtcggtcacaggcgtacgtttttcatcctctttgttgtgtatgtaccgtctacaaaaccagttcgatgtaattaaatatcgcccaaaattcctgtagctgtgttcatttgaataaatataaaaggtgcctttggaacagaaaaaaaaataaagtcacaataaaaaaataaaaaaaaaaaatacaatagaacgtaacatgcaaaaaaaaaactgcacacactaacaaaaaaggggccgccctaaaggttccaacctt

SEQ ID NO: 6079 - DNA, 436 bp, Triticum aestivum
  Clone ID: LIB104-047-Q1-E1-B12
gtaccggtctacaattcccgggccgacgggtcagaaaactgctgaagaagcctctctgctcaccattggcgctttccgtgggaagtgatagcaatggaagcggagctgtagctcttctgaaaattgcaaggatcttttcacaaatctattcaagccttaagaccagaagcaagtttaatcttctctttggattaacatctggctgaccctacaattaaaatggaactagcaaggttatcaattttttttacagcggcttgaagttttgaccaacatgtgcgtgatattattgactatgcaatttacttaagtatcattagttcctagagcaatgatctctggatgcatgtatcaaagcctccagagaagccttacatcaagcaaatctttgaggatttttcggatgtctccaaggaaatgggcatttcagtcgcac

SEQ ID NO: 6080 - DNA, 420 bp, Triticum aestivum
  Clone ID: LIB104-047-Q1-E1-B7
aattcccgggtcgacgggtgcctacaagcctcatcatgcatggtcttcgaagaagggtcatcctcacggccaggtatatgggtataggagctccctctgggcagaacaccttggtatggttgatgaccacttcaaggaaccttctagtcttgaatgtgtaagattagtgaaccaaatagccgaagaaaactgggaaagattcgcgtcagaagagatgaaaacgttgcaagggcacctcctcagatacccagtgaaggtagagcacgatggtaagatcgtcccgctgcccgaccaagaatgcttccccgatgttggcggcaagatctgcggcgctccgacctcgcttcctgattcgctgacgatgtagcgtcacagtactgacttctcttcagggtccaagctggttcttttgctcacctg

SEQ ID NO: 6081 - DNA, 425 bp, Triticum aestivum
  Clone ID: LIB104-047-Q1-E1-B8
gtaccggtcgacaattcccggttcgacggggatggcgacgctcaccaccgccaccctccttcttaaagcgtccgcggacgcgagcccgggcgttcagaagcagcgctacccagacctgaccaaggccgacgaggaatgctttgaaacctgctacaaggagctgaccaatggcggcgaaaaactcgacaatttgtgcaccagcatagagggctcggacgacatcggcatggctcagctccccgaaatccgcagcttcatcaaggagaacaacggggcgcatgcccagtggaattgcgataggtgtcgccctgcaaatgacaagaagacacccgacgatgtctccaagaagaacgatgccgagaaggccatggctgtcctggatgtgctcgttaacaaagtgaccaagtacagaaaaacaaactctc

SEQ ID NO: 6082 - DNA, 436 bp, Triticum aestivum
  Clone ID: LIB104-047-Q1-E1-C10
cggtcaacaattcccgggtcgacggggagatacagaatggttcctcgaaggcaatttcgagagctatgtgcggaagatgaggaagcctcacgcctggggaggagaacctgagctgctcatgtgctcacatgttcttgggatgcccatcaccgtccacatgtacaccaagggcaccgataaccccaggatcatagcagagtatggccaggagtacggcaaggacaacccggtccgtgttctatacgacggttatgggcactacgacgcgctgcagccatctcttgtaagaacacaaccaagactgagaggagcgtagctaaccggagaatggtgcgctatgtaagcttcttctactacttctctagggcagccgcataaattccgacatctgctgcaacttggtttcgttcgagttggcagatcacggtatagcaca

SEQ ID NO: 6083 - DNA, 439 bp, Triticum aestivum
  Clone ID: LIB104-047-Q1-E1-C11
taccggtcaacaattcccgggtcgacgggttacataaaaaataaaaacgccaaagaatatatttatgcggaagttagatatgagcatcacttcaaacattactatgtacaaattcatctgagtgaattgttccagcttttcaatctgcgcgagctcgacaaatctatcatcagttgctacgttctgtaagtgatttatttctaccccatctcgttcatattgcctgcactatatatatgtcctaactatattgttgtgtccgctattatacatgcagaatgaagattaaggaatgcagagtaaggaacatccatgatgttgggttcattgacccacacatcgttaatgaatatgtgttggagcatcaccccgccgacatggaggcagacctgtggcagtttcttacaaagcaggaactcaaaagtgatattctatttcc

SEQ ID NO: 6084 - DNA, 203 bp, Triticum aestivum
  Clone ID: LIB104-047-Q1-E1-C3
gtgagtcgtactacacgatccacgcttacgaacacacgaatgacgagctagcacactcatcgcatgtgtcaccaagatcacagttcacatcacctcctactgcaacagggacactggcgacaacgctaacgatggacaacattaatcaccatgccacacatcaccgctacggcaacacgggccacaactgccatgccaccacc

SEQ ID NO: 6085 - DNA, 406 bp, Triticum aestivum
  Clone ID: LIB104-047-Q1-E1-C5
aattcccgggtcgacgggtgaggtgatacgatcttgatatatcacgagctttgctattatagttggatcttatgtttctcctccccctctactctcttgtaatgaaatgagtttcccctttgaagttatcttattcgattgagtctttaaagatttgagaacacttaatgtatgtcttgccgtgcgtatctgtggtgacaatgggataccacgtgattcacttgatgtatgttttggtgatcaacttgcgggttccgacaatgaaccaatgcatagggttggcacatgttttcgtcatgattctcctgtaggaactttggggcactctttgaggttctatgtgttggttgaatagatgaatctgagattgtgtgacgcatatcgtataatcatacccagggatact

SEQ ID NO: 6086 - DNA, 437 bp, Triticum aestivum
  Clone ID: LIB104-047-Q1-E1-D10
taccggtcaacaattcccgggtcgacgggatgtgtgagatctggctatctagttgtttatccttagtagcctctcttaccgggaaatgtctcctagtgtttccactgagccatggtagcttgctactgctccggaacacttaggctggccggcatgtgtccttcttcgttcctgtgtctgtcccttcggggaaatgtcacgcgatgaataccggagtcctgttagcccgctacagcccggttcaccggagtcctgctagcccagtgctacagtctggattcactcgctgatgaccgacacgttcgatgctgggtcatggatgcctgtccctgtaagttagtgccactttgggttcacgactagccatgtcagcccgggttctttgtcatatggatgctagcgacactatcatatacatgagccaaaaggcgcaaacg

SEQ ID NO: 6087 - DNA, 418 bp, Triticum aestivum
  Clone ID: LIB104-047-Q1-E1-D11
taccggtctacaattcccgggccgacgtggggagcaacggcggcaagtgggactgggtggatggtgttcctggatatggtgatggtgtataccgcggctttgtgttcgacggtgggttcacagcaatgccgtgacccgcgaggctcatggaaaaagatatcccagactggtgcgtgactaaatgcgctcaactaacgattttccattgatctgggacatccatctactgctgaagaggaactgatatctccatacattttatttacatcgtacttggttcttagcttgatgaaatacttccagttgttgtacttaatgaacatgaaatgatctgttggttcgttgtttcagacattgaaatgatgcagactgttatatgtttagacgataaaatgttaaatgtcgcatttataggaac

SEQ ID NO: 6088 - DNA, 416 bp, Triticum aestivum
  unsure at all n locations
  Clone ID: LIB104-047-Q1-E1-D12
attcccgggtcgacatgccgccaaagaggaggccgcttggctccagcaccaggatgagctgaactcccaggaggaggaccttgccgcttgcgaggagaagctcgccgtgacactccgtgacaaggacgaggaggtccaggagctcgtcatgcagcggatccgggaactggaggagaggcacgaggagggcctcaatgcttaggcccaggcccatgccggcaaggtggacgagctggaggcagagcgtgacgggctgaagaggcaggtccaggagctaacggggtagagggacgcggccaagggtgctttggctcacgcataggccgtagtcctcgagaaggccgcgctactctccatggccaacgagtccatcaaggacatgaacctgaagctgganggcattgaagggacactct

SEQ ID NO: 6089 - DNA, 401 bp, Triticum aestivum
  Clone ID: LIB104-047-Q1-E1-D2
attcccgggacgacgggggggcctagccggagttgacgattccggcgaggcagggccgttccagcagctccaacagcaccatcgcggccagtggagcaccacgaacacccaggagaggtcgaaggaagatgaggggcgccggaggaagcagaatgccgaggcgcggtcggcggcgagctccagagcaagacggcggccagaggcccgcctgtcctggacgcggttatctagaggaagtgtgggcgccataggaggagggtggtgtggtcgaacgggctcggaggggtcttatttataggcggggcgaggaaggggatcgagagcaccggcgagctctcttggaggaggtgcacgacgacgagaggcgtcagggagagagaggcgggagtggtcaggggtca

SEQ ID NO: 6090 - DNA, 434 bp, Triticum aestivum
  Clone ID: LIB104-047-Q1-E1-D6
taccggtctacaattcccgggccgacggggatgggacgtaagactgcaatctttctccaattatctacctggattattatattcggtgtctatgttgtttaccgtttactattagccagtatgtgccaaaaagggaagatctgagatggagcaaaccaattcatggctcttctaacgcgaatgtagatgcgtcatacaatgaggattaagcagcaccatgtgccacatgagctgttatgcatgatgaggggggtcaattcattgccatagcaacgtagtttataacatacgtaccgaatgcggaagccgctgaaacactcgcccttcgaattggtcttcttccggctgagcagccaggatgtaacaaactgatggcgccatggcggaatctgattgttccctggttatcgatgctatcaacgatgctgagaact

SEQ ID NO: 6091 - DNA, 429 bp, Triticum aestivum
  Clone ID: LIB104-047-Q1-E1-D8
cggtctacaattcccgggtcgaaaggagtgggtaattatgaaattgagaaatacttttgttgaagttggcaagtcccatagcatgcacgtatggtaaaagttgtgtgacaaatttgttgcatgaggtgctcttttcattgtcttccttatgagtggcagacggggacgagcgatggtcttctcctaccaatctatccctcttggggcatgcgtagtagacttttgcaataagtatatgagttctttttgactaatgtgagtccatggatatacgcacactcatccttccattttgctagcctttattattaccgagcaactttcgccggtatcatgaaccctttatttaccttcctcaaaacagccaccatacctacctattatggcatttccatagccattccgagatatattgccatgcaactctcc

SEQ ID NO: 6092 - DNA, 439 bp, Triticum aestivum
  Clone ID: LIB104-047-Q1-E1-E10
taccggtcaagaattcccgggtcgacggggctgacgacggggatgtcggactggagcgagtgcccggagctggggccgatcggggacctgcttgtgtccaaggacttccagaccaaggcgtccgtgctggtggtgcagtcctatgggagggcggcggcggcggcggccgcgtcgacgtcttctgaatttgctgttggcgaggccgtcttgccggcgccagaggccatcatgccggcgacctccatggggcacccgccaaggcgcccacgacaacattcacattctgaccttatgctttgatagtagtatagtttggtaaagcttgctagcacattgattaattaattaattaattagggagcgcctaatttttgcaggggaattaggaagtgtctgatgatcagtcgagtgatgttaatttgggtgacagtcaaacatt

SEQ ID NO: 6093 - DNA, 434 bp, Triticum aestivum
  Clone ID: LIB104-047-Q1-E1-E12
taccggtctagaattcccgggccgacgggagcagccacaccgaccactacccgagggaccacaagatcttcaaggaccccatctccttccacaagcgtgggttcgagttcatcaggcgcaccttcatggacaagcagaacgtgaggctcgactgcaagaggttcagacctgtgctgctggaggcactggacaacctcaaccagtaaatttaaggcaacttgccacccatttttaccattcgtttcgtgaaatttgatgttcattctctcatggcgtgtatgtatggtctaaactatagagattttgtctaggaattactcgtgtaaactgtataaattaaattgcccgccgctgcaaagatggaacgaaattcattgaaaaaaaaaaaggataatacaaaaaaaagaaaaaaaaagaaaaaaaagaggaacaac

SEQ ID NO: 6094 - DNA, 429 bp, Triticum aestivum
  Clone ID: LIB104-047-Q1-E1-E6
taccggtcaagaattcccgggtcgacgggtgccccatagcgaccagctgaagtagctggtcgagctccacaaggcggccgaacaggtcatgaagggcctcatagttcggctgtggcctaaggaggccatgtctgggagctactttggcctggtgcggcggctggtggatgcgtgctcgtgggttgaagtcatcaagcactccgcctgtattgaaggtgcccgtcgggcccttgcccgcgcaaaggtgcactggggcaagatggatgcccagaagctcgtgacggacccgccaccagagggcaaggagcattacacgcccgagatgtattataagagtgtgctgaagggcgcccgcactattgcgggtgagtgctccaaagatgtaatatttgagtagactcgcattttgttatcctgtgcgttgaaaac

SEQ ID NO: 6095 - DNA, 426 bp, Triticum aestivum
  Clone ID: LIB104-047-Q1-E1-E7
cggtctagaattcccgggtcgacgggaggtcgaaggtgttgcctacaacgaggcctatccgacgcaggacttctttgtcgttaccaaagtctacagtaacgaatttgactaggttgctctcgaggaagttcttaaaattctggcactcaacatcggcatggcatatgtggtagaccaagcataagtcatgcacgcaaacctggatcacgacgggcttcttcctctcttcatcctttagatccttctctcgtcccaggactatggtgtactcaacatctagcccagcgacccactcatcatctgagtctttgaacatgcgtctgaagcgagaaaggcatcctttcaccatcgcggaagaacgggtgtagatgacgtcgaactcatcgccggtgatggttctaaccttgtactcaccgccgatcgtgg

SEQ ID NO: 6096 - DNA, 398 bp, Triticum aestivum
  Clone ID: LIB104-047-Q1-E1-E8
taccggtctagaattcccgggccgacgatgccggctacctgcacttctttacccaagtcgtgacctgccatgaaagcagggccgctagggctcgtcagctcattaaggagaagagtcggtatctccctgggcgtgcattctcgcgcgtcttcagctaccttctcagcctggatccggattttgacttcaacaccgcgatagcccccctgcccggggtcgtacagggcgacctggcgagatgggtggacgatcatcttgacgacctgattaaggagtttgctcttgctgacgacgtggctgcactcgcaaccaaggagggcggagccaacgatgatggcgacaacgacgatatgggcaacatcgcgtcccgctaggcctgtacttctttgctcttcctg

SEQ ID NO: 6097 - DNA, 266 bp, Triticum aestivum
  Clone ID: LIB104-047-Q1-E1-F11
tacggtcaagaattcccgggtcgacgggaattacccacggttgtcgtccggcgagcgctgagcggcacggcggtggctgcagagttttttggctgcagagttagcatagggtgtttttagttcttagtttctttagtttttctagctttgaccgatgtatggtccgaaaatgtctgtaattttaagcttttttgtgtaactttttcttgctgtgtttatattttttttctctctatgtaatgacatgagcattttttaagaaaaat

SEQ ID NO: 6098 - DNA, 426 bp, Triticum aestivum
  Clone ID: LIB104-047-Q1-E1-F12
attcccgggtcgaagggatggaccaccgggacccttccggtggtcccggtacaatacctgtgacccctgaaactttctcgatggccgaaacctgacttcctatatataattctttacctccggaccattccggaactcctcgtgacgttcgggatctcatccgggactccgaacaactttcgggttactgcatactaatatctctacaaccctagcgtcaccgaaccttaagtgtgtagactctaggggttcgggagacacgcagacatgaccgagacgactctccggtcaataaccaacagagtaatctggatacccatgttggctcccacatgctcctcgatgatctcatcgaatgaaccacgatgtcgaggattcaatcaaccccgtatacaattccctttgtcaatcgatacgttacttgcc

SEQ ID NO: 6099 - DNA, 372 bp, Triticum aestivum
  Clone ID: LIB104-047-Q1-E1-F3
attcccgggacgacgggaggcccaaaaacgtgaccacggcgctgcacccggagatgatcctggcggcgaccaacaccggcgacatcatggacgcctaagcaaagcactgatccacggacaccaaggcgtacgtacgctggagtttgggggcgcaagatcaataagatggctcggtgaaacagacgatgcttagggacgagggcttgtctttgtgatttgtcaaactcgtgtttaattccgatgtctgtctttagttttcgtgtgttaacgtaatttgttcatgccacctgaccgccatgtgctctgccctgcctctacctcgcggcaattccatggaggatgaaaccttctggaacatgaggagggaataaa

SEQ ID NO: 6100 - DNA, 437 bp, Triticum aestivum
  Clone ID: LIB104-047-Q1-E1-F6
taccggtcgacaattcccgggccgacgggcgtcccgggcttgataacagggagatgggttcctacctcatgcattctactgaactacaagaattcaatatcactactggagggattatgaatggtgacaataaatgcaataaaacataggtgtgaataacatggttaaattgaacttacctggtaagttgatgaagatgttaacgctcttggaaactttgataaactattcgttactccaagaaaatctatatagtcaaacattgcattcacataagcaacaatcctagcaatcaattataccaatcaaaaagcaataaataaagcaataatgatttcaaagaaaatcaaataaaattccaaagaaaactctaaagaaaacaagggcgaaaccaactcacagaatatcaatcaatactcgcataacaactctaaact

SEQ ID NO: 6101 - DNA, 418 bp, Triticum aestivum
  Clone ID: LIB104-047-Q1-E1-F7
cggtcaagaattcccgggtcgactttgacgatcagactacgaacgtgcgatgacgtcgcgccttagcaatcgctaaaccaactccgagaggttattgaccacgccggagcacgattaacctgaccacgagggtctgtttcctgcgagcaaacgaagaacaagcaagaaactgagattgcaatctggatattgcgaatataagatgaaagctttattgatcaaggtggggttctgtgacgcctttgtctggtcgttgaacacaaacgaagtacgcgaagttgcggctatggcgaacttttaatctaaacaaaacccaaagtctaaacgacgccctaagggctgtatatatggaggaagagggggaatttcgtggcccttggggaaggggtccgaaaccaaccctatctcttgtttcccc

SEQ ID NO: 6102 - DNA, 390 bp, Triticum aestivum
  Clone ID: LIB104-047-Q1-E1-G1
ccggggcagaattcccggaacgacgggagaacggtctagggtaccaagggtttatgatgtctcgttgtttttgcatgctagcaagtgactccgggatgccagttttaagatttcgcttgtgttgaaagatattattattattactgcttgtagcctacctgggataccgtcatattttgctgattatggaaccccttttatcctgcttaaaaaaaaaaaaaaaaaaaaaaaaaaaaaaaaaaaaaaaaaaaaaaaaaaaaaaaaaaaaaaaaaaaaaggaaaaaaaaaaaaaaaaaaaaaaaaaaaaagcggccgccctaaaggttccaaccttacttacccgtgcatgcaacgtcaaaccccttctaaagggtcacctaatttcaattc

SEQ ID NO: 6103 - DNA, 443 bp, Triticum aestivum
  Clone ID: LIB104-047-Q1-E1-G10
taccggtcaagaattcccgggccgacgggagatggaattgaaagagaagtttgaaaagaaccttcaagaggcagcagataagtaccaaaacaccaacttgtatctgaagaacttagatgatactgttgatgatgaaaagttgcgagaactttttgctgagttcggaactattacttcctgcaaggttatgcgtgattcaaatggcgcaagcagaggttctggatttgttgcttttaaatccgctgatgatgcttcccgagctcttgctgaaatgaacaacaagatggttggcaataaaccactttatgttgcactcgcacagcgcaaggaagacaggaaagctaggctgcaggcacagttttcacaaatgcgtcccgttccaatggctccaaccgttggtcctcgtatgcaaatgttacctcctggtgttccagtcggtcaac

SEQ ID NO: 6104 - DNA, 436 bp, Triticum aestivum
  Clone ID: LIB104-047-Q1-E1-G11
gtaccggtccagaattcccgggtcgacgggtcctattactgttgtgcctcacgaaaatataattgtggaagatgatgcacttgatgatgatctcgttatgcctattgcttgttgtgatgattattattgggaagataatgatacttttatgatcttgaaaatctttttggcacttgcttggaagaatatgataattgctatactattggtgctatccatactattaatgatgagagtgattatgcttatgatatgaaaaggaccaagcttggggatgctatgtttgatgagagtgacatttttgagaatatattttctgcaattaatgtttgtcccaagcttggggatgctacgtttaatgaagatgatacttttagtctgccaagttttgatatgcaaatttataatgatgatagaatgcctcctacttatgatg

SEQ ID NO: 6105 - DNA, 471 bp, Triticum aestivum
  Clone ID: LIB104-047-Q1-E1-G3
cggtgcagaattcccgggacgacgggtttggcacaattgcctgtttgcttgcctggctagtccaaagtcatgatatttttgttatagaattatttttcatagtctaaaataattagagataaatattggggccatgcgtagctatcatcatgggtagcaagttatttctctatgcacaatgccttcctctcaaagtctggctctttttgttttgcgagggaaagtcttgctctttttaacgggcaacgatgcaacgactccttatgcgatacacaaataagtgtaccccgctaagctcgcacgtataccacaactcattcactctattgtcaaattttcacacactatactagaagtttattttaaaaagaatcgcctcgtagcactagtaattctgttaccaaatgaatgtacatcctcctttagttcctccaagtctaacaaaactttcccgtaaaaaaatgtcatacc

SEQ ID NO: 6106 - DNA, 421 bp, Triticum aestivum
  unsure at all n locations
  Clone ID: LIB104-047-Q1-E1-G7
taccggtcaagaattcccgggtcgacggggagccataggaatcttgcttgtttatgacgtcacggacgagtcatctttcaacaacatacggaactgggtacgcaacattgagcaacatgcctctgataatgtgaacaaaattttgataggcaacaaggctgatatggatgagagtaaaagggctgtttctactgcaaagggacaagcactagccgatgaatatggcatccagttctttgaaactagtgccaagacaaacctcaatgtggagcaagttttcttttccattgcccgagatattaagcagaggcttgctgagactgattccaagcccgaggaccggacgatcaagattaacaagacagaaggttctgagaatccagaatctcagaaatctgcctgctgtggctcatgangagta

SEQ ID NO: 6107 - DNA, 438 bp, Triticum aestivum
  Clone ID: LIB104-047-Q1-E1-G9
taccggtcaagaattcccgggtcgacggggggctctaggactcgctcctcaactggctccgaagcctgttctttaagcaggagatggagctctccctggttggcctacagaatgctgggaagacatctctagtcaattcaattgctaccggtggatacagcgaggacatgattccaactgtaggctttaatatgcggaaagtcaccaagggaaatgtcacaattaaactttgggatcttggagggcaacgtagattccggactatgtgggagcgctactgtcgtggagttacggctattctatacgttgtcgatgctgctgaccgggatagcgttccgattgctaaaagtgaattgcatgacctgctgacaaaacaatctttatctgggatccccttacttatccttggcaacaaaattgacaagtcagaggcacttt

SEQ ID NO: 6108 - DNA, 423 bp, Triticum aestivum
  Clone ID: LIB104-047-Q1-E1-H3
cggtgcagaattcccgggacgacggggcatttaaattagagatgacaaaaaacatgtctacaatgggtcatttcttagccttatcttaaataataactagttattcctaaaaacgtggtgagacatattgttttaagagattatctcatgtcttctcttaaataagagaagacaagcattctcttagggcatgtaaaatggttgataagacagtcttatcttaagtcttgcatgtaattagaggcgacccattaggtcatgtacaatggctcataagatagtcttatattaagtcttgcatttaatttagaaatgacaaaaaacatgtctacaatgggtcatctcttagccttatcttcaataataactagctatttctaaaaatgtggtgagacatattgttctaagagattatatcatgtc

SEQ ID NO: 6109 - DNA, 414 bp, Triticum aestivum
  Clone ID: LIB104-047-Q1-E1-H5
taccggtccacaattcccggttcgacggggagtgaacaaaaaaaaaaaaaaaaaaaaaaaaaaaaaaaaaaaaaaaaaaaaaaaaaaaaaaaaaaaaaaaaaaaaaaaaaaaaaaaaaaaaaaaaaaaaaaaaaaaaaaaaaaaaaaaaaaaaaaaaaaaaaaaaaaaaaaaaaaaaaaaaaaaaaaaaagggggcccccccaaaggttccaatttttttttcccttcattcgcactccaaacccctcccaatggtccccccaattttatttccagggccctttttttaaaacctttttccgggaaaaccccggggtttccccaatttaaccccttttgaaaaaacccccttttccccaagggggtttaatccaaatggcccccccccttttccccttccaaaaattttccccc

SEQ ID NO: 6110 - DNA, 410 bp, Triticum aestivum
  Clone ID: LIB104-047-Q1-E1-H7
cggtcaagaattcccgggtcgacggggaagatgacttgtttataagctcagttgcctcttgctcaaatttgtgggctctaataatggatgctggcactggctttacttctcaagtctatgaactttctccatattttcttcacaaggaatggataatggagcagtgggagaagaacttctatatcactgcgttagcaggtgcaaacaatggtagttctctggtggtcatgtctagaggaacacaatatgcacagcaatcctacaaagtaggtgactcgtttcccttcaagtggataaacaagaagtggaaggagggtttttacgtcacagctatggccactgcaggaagccgatgggcagtggtcgtgtcccggaatgctggctttgtagatcaggttgtggagcttgac

SEQ ID NO: 6111 - DNA, 437 bp, Triticum aestivum
  Clone ID: LIB104-047-Q1-E1-H9
taccggtcgagaattcccgggccgacgggaagcagaagttgtggcgcggttggcatcggaaatggatgtgatgaagaaaaccgtgagtgtactagtagccgaacgagatgcagctcgggcgcagcatgaagatcatccagcggatctcagaagccagcagcggagaagcagtgtggcttccacggaggccccacctgctggtgcagatgcaccgacgatcgaaattactgcaccggagcctctggtggtcgaaattactgcaccggagcctctggtggtcgaaattactgcaccggagcctcctcgctaccccgtggacgatataaaggagatgaaagaatgtcatctgtattatcctatcgggaacatgtccatgaaggtagccatcggcagtgctttaccatgtttacctggagcactccaccacaacaccccca

SEQ ID NO: 6112 - DNA, 389 bp, Triticum aestivum
  Clone ID: LIB104-048-Q1-E1-A1
cccgggtcgactgtaaccacggactgaatttcgcccacaaccggaacatgccggtaatggaccgtaattaaccgaattctggaaatgagcccaagaataaatgggcccttagaaggctgaaagttaacacgggctggaaagggtcaacggaataatggactgttaatgggtataaagccatacactattcattatgggtcagtttcaccttgggcctttagtgggcccatagttacaaaggaccttgcatgggccgaaagacgttatgggccatacatgggccgaaagttacaactgattgtaatcatattggacggtccagatgacgttgctgggcctaattcggataggccataacgggccgtgagttagcgaactgtaaatgggct

SEQ ID NO: 6113 - DNA, 393 bp, Triticum aestivum
  unsure at all n locations
  Clone ID: LIB104-048-Q1-E1-A6
ggtcttngattcccgggtcgacgggtatacataaacggtcgcacgggaggcatcataatactttcaggcaaaagtataaacacagcctttataatttaataaacattgttcttacaatgggaatacatgtcactagaacataatattcttcgagcactgagcctctattaaactagcgccttcaaggacttctttaaagtagtgctcggccgatactcggcccacggctgaactctgggtcgcaatagcggtggcctccatctctgcccagtatgtcttgacatgggccagagccatccgcgcaccctctatgcacgccgacctcttcatagcgtcgatgcgcggcacagcaccaaggaactgttgcactaaactaaaataactattcggcct

SEQ ID NO: 6114 - DNA, 201 bp, Triticum aestivum
  unsure at all n locations
  Clone ID: LIB104-048-Q1-E1-A9
attcaagggccaacgggaacccaaaangnaaaactttnnntctaaaatcagacaaaaaagaaaggaaaacaaatcaaaggataaaaaggaaataaaaaaaaaaattttaaaaaaaaaaagcgggcgccccaaaagatgtaaacttaactttacctgcaatgaaagttaaaagccttccaaaatgttaaccaaaatttattt

SEQ ID NO: 6115 - DNA, 294 bp, Triticum aestivum
  Clone ID: LIB104-048-Q1-E1-B11
tgtgatatgtcaagtagtggacagataagccaaccactggatgtggttttcagggatttttgcagtgggatttgtagggtactatgctgcgctgtgtttgggatttgaaatagaacgatgggagatgtgccacgctcttaaaatcaaacacataaggcaaaaaccaatagcaaatgtgccagccaaatctgcaacatgcatgcacataaaaaattggccgcccatcaggatctaaactaacttacgcgtgtatgcgaattcataccccttcgatagaggcacctaaattcattt

SEQ ID NO: 6116 - DNA, 433 bp, Triticum aestivum
  unsure at all n locations
  Clone ID: LIB104-048-Q1-E1-B5
tcccgggtcgactctcgccaccaactcaacaacggccgctgcatcaacctgatttgaccagagttcatccgcgtgcctccactattcaacaactttggtgagttctcctcctctagatcttgttagggttttcacgagtttgttggtagttcatcctcgttcttcgctgtagcttgtaacttttgattcagacttagtaccctcctacgcggcggtagacatggtaatcatttttgttattagaacatctcccttgcgtaagaaaaccaatctggacacatgaactgctcacgtactgcaacttaggtctaaatattttccattctctgaagtgtcgtagatccaaaattgtagcatcaatctgtgaaatctgtntttccaacacttagcaattttcccattctcagatctgtgaaattaatatttgtgcgtg

SEQ ID NO: 6117 - DNA, 387 bp, Triticum aestivum
  Clone ID: LIB104-048-Q1-E1-B8
tcccgggtcgacgggggcggtgaccgggaccctgaactacaacaagcaacatagcgtggacatgcacctgctgccccctcaggtacagaatcctgtatatggctggtaagacagaaccactgctgttagtagtacatagataggcctgtaatttgtgacactaattctttttcctcctctccccgatgccaacggcaaagccttgttcattattaccaatacgaactacagactgcttgtagcactagataagacttgtgtattcgatatttcgatcccttgagttttgatggccattttcactgggacgctcaaaaaaaaaaaaaaaaaaaataaaaaaaaaaaaaaaaaaaaacaaaaaacaaaaaaaaaaaaaaattcaaacaa

SEQ ID NO: 6118 - DNA, 424 bp, Triticum aestivum
  Clone ID: LIB104-048-Q1-E1-C12
attcacgggtcgacggcacaacataaacaacaagctgcggcttgtcatgaagagcggcaagtacacgctcggctacaagaccgtcctcaggaccctcaggaactccaaggcaaagcttgtgatccttgctaacaactgccctccactccgcaagtctgagattgagtactatgctatgttggcgaagatcactgtccaccactaccatggaaacaatgttgatttgggaactgcgtgtggtaaatacttccgagtctgctgcctgagtatcatcgaccctggcgattccgacatcatcaacgcaacaccagctggccagtaaacctgtgcatgccattttcagtgtctcgtctgatgccattttcttgctggacttgatttggtcttgtgtacatcatttatcagtcaatcaagtttgatggga

SEQ ID NO: 6119 - DNA, 457 bp, Triticum aestivum
  Clone ID: LIB104-048-Q1-E1-C6
cgccggcaggatacggtcaagaattcccgggtcgacgggacgtgtgttgagttcgtggttcgtggatggcaggtatggtttcctccttcgacgtcttagtcgcggtggggtgccagatctggagttcgatggcgtgttaagggtgttgtccccgtctgattcgttcaaccgcaatggcttcacttttggtgagccaccttgaaagtcctcaaagctgcatatcagtgatggcgccacgtcgagttaaggtgaggaggtgatccgtcattcttttcttcggtggctgttgtgatggtgcaggaggcaggtgacgggcattgacgtcaagctcaaagatgttctactatcttttcagttttgtcatgtaggtctttacatgacttgtattttgttcaatatgatatgaatgaaacgcgtattgccaagcaaaagaaacattccttgataaatattaatt

SEQ ID NO: 6120 - DNA, 420 bp, Triticum aestivum
  Clone ID: LIB104-048-Q1-E1-C8
ggtcaaggattcccgggtcgacgggttgaagtacgcagatcacagatcaaagtgccctttgtgccgacaggctggggtctttcctaatgctgtgcacttggacgagctgaacatgctactaagctatagttgtccggagtactgggagaagagaatgcagatggaacgagttgagcgtgttcgtctggctaaggagcactgggagtcccagtgcagagcattcttgggcgtctgatggaacatgtagacttcgtacaaaaatgggattccccattgctgttggttagatcttgatttggcatgactgtaatatatttgtatctatcctgctgaatgaattggtctgtaattgggaggtcacttgtgcgcctagatgtaaaaaggggtaaacttgtagtgattatctgaatgtaaaattgc

SEQ ID NO: 6121 - DNA, 176 bp, Triticum aestivum
  unsure at all n locations
  Clone ID: LIB104-048-Q1-E1-C9
acgttgtccctatttatgacccgtcaaccaaagatttgtgtattgtattaatgtgtgtattatatcaccacaacaatgtgctcgctattagcattaatgagttccgtatatcttgagacgaaaaanannnnnnnnnnnnnaaaaaaaaaagcggccgctctanaggatccaagctt

SEQ ID NO: 6122 - DNA, 276 bp, Triticum aestivum
  Clone ID: LIB104-048-Q1-E1-D2
cggggacgtcagagatcagaaaatttttaggctgcaggtgttggtgagatgagctgttgtgtgttatgaataacaaacagattaaacaaacccagaatgacagtggcaagattactttaaaaaaaaaaaaaaaaaaaaaaaaaaaaaaaaaaaaaaaaaaaaaggaaaaaaaaaaaaaaaaaaaaaaaaaaaaaagcggccgctcaaaaggatcaaagctaacgtacgcgtgaatgcaacgtcaaagctcttcaaaagtgtcaccaaaattcaatt

SEQ ID NO: 6123 - DNA, 386 bp, Triticum aestivum
  Clone ID: LIB104-048-Q1-E1-D6
ggtcaaggattcccgggtcgacgggggattctattgcgatttcgttggcaaggatgaatgatctaatcgctcccagtgacagctgattgatctaggttcactaacaggacgcgagaggctatggaagtcaggtttgttcgtatggataatgtttgggagcagtgataatcgatgagacgttaatctcaatatgtacgataataattcctcaagatataagtgtaattccaaaatattattcgtaaggaacttaaaaagatgccctttgattttgagaatagtgtgaaagaatttatgatctcggacgataattttaatgcattgctagatgaacaattgcgtacagttaaagatttggataggaacgtctatatacattcgattga

SEQ ID NO: 6124 - DNA, 408 bp, Triticum aestivum
  Clone ID: LIB104-048-Q1-E1-F10
attcacgggtcgacggcggtgcggatggcgcaggccgggtacgccgtgtacggggtggactacgagggccacggcaagtcggaggggctccagggctacattccctcctttgacctcctcgtcagcgacacggacgccttcttcaccgccgtcgtcgcctccacggccaacacggacctcccccgcttcatcctcggcgagtccatgggcggcgccgtggcgctgctcctccaccggatgcgcccggcgtactggaccggcgccgtcctggtcgcccccatgtgcaagatcgctgacgagatgcggccgcatccggtggtggtgagcgtcctcaagctgatgaccaacatcatccccacgtggaagatcgtgccgaccacggacgtcatcgacgccgcctacaggatg

SEQ ID NO: 6125 - DNA, 455 bp, Triticum aestivum
  unsure at all n locations
  Clone ID: LIB104-048-Q1-E1-F5
ggtcaagaattcccgggtcgacgggaggtcaaacaagccagagcccatagtgacttgcggttgcataggtgagctttcgggcatgaagtattcttccgtctctttgagtctgggtgaagctttccgcaagatgtcatggcgcttctccatgcatcccggccaaccactggtttctccagggtgcccgtcaaccgtccttcacccagtactgtgtattgaattcttgtctcgagtctcgaaatcttgaggagtcctgaagatgaagtccttgcagatgttatcatgaagttgtcgtctttgacataaagcccttcattctcacaccactcccgagcaatcataccaaaccccgtctactacagcgtagcattaanactatatacgtcccgggcttggtaacacggaggtgggttcctacctcatgcattctactcaactacaagaatcaatatcat

SEQ ID NO: 6126 - DNA, 454 bp, Triticum aestivum
  Clone ID: LIB104-048-Q1-E1-F8
ttcccgggtcgacgggtctgcaaaatttagatctgtatgtatcttgcaaatttctatgtctcccacctggactaaataccggatggaattgaagcgtctcttgatgtgcttggttctcttgtgaaatctggattccttcgccaaggtaattgcaccagtattgtcgcaaaagattttcattggacccgatgcactaggtatgacacctagatcggatatgaactccttcatccagactccttcatttgctgctttcgaagcagctatgtactccgcttcacacgtagatcccgccacgacgctttgtttagaactgcaccaactgacagctccaccgtttaatataaacacgtatccggtttgcgatttagaatcgtccggatcagcgtcaaagcttgcgtcaacataaccatttacgatgagctctttgtcacctccataaacgagaaacata

SEQ ID NO: 6127 - DNA, 413 bp, Triticum aestivum
  Clone ID: LIB104-048-Q1-E1-G10
gacatgggcgacaagctgataatggacaggttccgtcaatggcaggccacgcacaaccggtcgtacctgagcgcggaggagaggctgcgtcgcttccgggtgtaccgcgacaacgtggagtacatcgacgccaccaaccggcgcggcgacctcacctacgagctcggcgagaatgagttcgccgacctcacccaggaggagttcctagccaggtacgcgtcgtcctacgatggggtcggtgatgatactggcatcacgttgcctgtgggcggtggcgacgccgagctgtggtcgtccggcggcgacaatgatagctccttggaggctccgcctcccagctgggactggagatccaagggcgccgtcacaccggtcaagtcccaaggcgcaggatgcgctaactgctgggcgtt

SEQ ID NO: 6128 - DNA, 156 bp, Triticum aestivum
  Clone ID: LIB104-048-Q1-E1-G2
ctgaagactgtccaacacactaaatcacactgtgtatgtatacttagcctctggcactgtcgctctgaggatcaaacttacgttgacgttcagtcgacgacgcatgacatcaagttaggcacctaaatgtaactgactggacgactttatagatgt

SEQ ID NO: 6129 - DNA, 432 bp, Triticum aestivum
  Clone ID: LIB104-048-Q1-E1-G5
ttcccgggtcgacctccgcggacaaggtgcagcgcatgatggcagagatcgacaccgacggtgacggcttcatcgacttcagcgagttcatctccttctgcaacgccaacccggggctcatgaaggacgtcgccaaggtcttctgaatcagttcatttcacctcagccgtccgttccaggagccgatccatctacgtacggcttcgtatatcaatttcatgcaactacctactccggtcccgatccagcctcagcttcacctgaggccggccctaaatttgtttgatcaattcttttgctactagtagtaactagtgatgatcactgttgcatcatttatttatttattttatatatcatcacaagtttcctgtgattcttttctttctatacctttttgtcgatcgtcggctccagctcgatcgaacgatc

SEQ ID NO: 6130 - DNA, 423 bp, Triticum aestivum
  Clone ID: LIB104-048-Q1-E1-G7
ttcccgggtcgacctccgcggacaaggtgcagcgcatgatggcggagatcgacaccgatggtgacggcttcatcgacttcagcgagttcatctccttctgcaacgccaacccggggctcatgaaggacgtcgccaaggtcttctgaatcagttcatttcacctcagccgtccgatccaggagccgatccatctacgtacggcttcgtatatcaatttcatgcaactacctactccggtcccgatccagcctcagcttcacctgaggccggccctaattttgtttgatcaattttttgctactagtagtaactagtgatgatcactgttgcaccatttatttattttatatcgtcacaactttccagtgtttcttttctttctctacctttttgtcgatcgtcggctccagctcgatcgaacga

SEQ ID NO: 6131 - DNA, 254 bp, Triticum aestivum
  Clone ID: LIB104-048-Q1-E1-G9
taccggtcaaaaattcacgggtcgacggcgagcacaagaaggacggcgagcacaaggagggcatgatggagaagatcaaggacaagatcagcggcgacggccacggcgacggcaagaaggacggcgaccacaaggagaagaaggacaagaagaagaagaaggacaagaagcacggcgagggccacaaggacgacgacggccacggcagcagcagcagcgacagcgacagcgactgagccagctccggccgcgct

SEQ ID NO: 6132 - DNA, 162 bp, Triticum aestivum
  Clone ID: LIB104-048-Q1-E1-H11
cggcctcatccaaaaggaagaactgcagctagcattattcaagactcctagcgggcagaatctttttattgacagggtttttgatttgtttgatgaaaagaagaatggagtaatagagtttgatgagtttattcatgctctcagtgtcttccatccatgttc

SEQ ID NO: 6133 - DNA, 375 bp, Triticum aestivum
  Clone ID: LIB104-048-Q1-E1-H5
ggtcttacaattcccgggtcgacgtttgccggaaggccacgatgtcgtggtgttcgaatttcatccccgtttcttgcatgggacataagcataaacccatggacacatatatgattttacaacccatgttggtgtaccggagcatgtgcatgtagtttaattttgaattgtgcacctgaaatggctagaaaaccaatttaatgtgtaaaatgttcaaactaatcctgaataattccatttcttttacgacacacatatatttgcttgttcactgtagataaagggtctagcatttcaaacaccgtccattgccgctgtgaccccattatgtaattcaactcaagatgaaaactcatgtatatcccacacatttta

SEQ ID NO: 6134 - DNA, 423 bp, Triticum aestivum
  Clone ID: LIB104-049-Q1-E1-C10
attcccgggtcgacgggttgtcttacttgtgagtggcggtcgaggacgagcgatggtcttttcctacaaatctattcccctaggagcatgcatgtagtactttgttttgatagctaatagacttttgcaataagtatgtgagttctttatgattaatgttgagttcatggattatacacactctcacccttccaccattgctagcctctatagtaccgcgcaactttcgccggtacattacacccaccatataccttcctcaaaacaaccaccatacctacctattatagcatttccatagccattccgagatatattgccatgcaacttccaccgttcagtttattatgacatgcttcatgatgaggacatcaataccattgttacacccacatcccctgctactatacataatggaccaat

SEQ ID NO: 6135 - DNA, 364 bp, Triticum aestivum
  Clone ID: LIB104-049-Q1-E1-C8
tgacgggcagagaaaagtcaggggccggccgagaaagaaatagctcccggctgctcccatcaagtcggctggaaaagaagtggccgagtgcccatagtcgggtgctagaaaaaaaagtcaaaggttgactggccttgaaaaaaaagtgaccgggtgagatggccggctgcccgagagtcggctggaaaaaaagaagaagaaagaaatgtgcgtctgactgtcagatgtgcgtccgaccgctggctgcctggccggctgcaaagagcgcgactgttgtgtcggggtctgcctgcccagccggctgaggaaaaaaaaaaaaattaaaaaaaaaaaaaagcggccgctctagaggatccaagcttac

SEQ ID NO: 6136 - DNA, 397 bp, Triticum aestivum
  Clone ID: LIB104-049-Q1-E1-D5
ttcccgggtcgacggggtagcctacattgcaatctctcgggttcggttagagcccaacgcctcgctcgggttcagttagaaccaacgcctcgcacacacgcacgtacgtgtacaagagaaacgcgcatcgctcggcccccgacctcccaccgtaatcaggaactcgccgaaattttcgtccccctcgcttctagcacggttttttccgtcagggacgatcgacagaatgtcatgcagctgcatctccggcccgcccaggataaaaagcccattttctgtcatgatttttttgttatatcagtaggagcccaccacatctatgatgataccgggttttgtcacaattatcatcatagaactgtcatatgtatgacaggaaaaaatttcgttcgtccca

SEQ ID NO: 6137 - DNA, 407 bp, Triticum aestivum
  Clone ID: LIB104-049-Q1-E1-D6
ggtcaagaattcccgggtcgacggggtcatattatcagggcccaatgcatggtagtagctgaatcatggatcacaaacacagaactcagttcctaaggacggcttcaatgagacaacccaccatgtactcctacatggactctcaccgctacctttaccaaatcgtgttcacacacttagctcacacacagtaggacatgttcacacacctctgattcatccccgatgaatcagacctgactcaactctaagcagtagcaggcatgacaaacaagcatgaatgagtaggcacaacagggctcaaacaactcctactcatgctagtgggtttcatctatttactgtggcaatgataggtcatgcagaggataaagggttcagctaccgcagcaagtaacagatgaatc

SEQ ID NO: 6138 - DNA, 404 bp, Triticum aestivum
  Clone ID: LIB104-049-Q1-E1-D7
ttcccgggtcgacgggcagtggaacaaggccggaggggatacctggaggtcgtcgggatgtaactaggtgagcggcggcgggcagaatctgcgagcaggtggcgtaggccctgccgcgccagagcttggtcagagagaacggcgtgtaccgcagatcgggacatgctgcctcggcaccgtcaaacggagaaacgatgcacttcctccctttcccctggcggacgggatgcggccggatcagtgaccaacgatgagagagagagaggccaccgcactccctttccctcggcggacgggatgcggccggatcagtgatcaacggtgagagagagagaggccaccgcagccttgtgtgagatactctgaagagcgacaaaccaggtaggcaggctccattgtatata

SEQ ID NO: 6139 - DNA, 403 bp, Triticum aestivum
  Clone ID: LIB104-049-Q1-E1-E6
ttcccgggtcgacgggggaacgaagagatcatggctaggggaacttttgccaacattcgtattgtgaacaagttcttgaagggagaggttggcccccaaaccatccatgtaccatcaggggagaagcttgctgtttttgatgctgctatgaaatacaagaacgaagggcatgacactatcatcctggctggtgctgagtatggcagtggaagctcaagggattgggctgcgaagggtccaatgcttcagggagtgaaggctgtgatagccaagagttttgagaggattcaccgtagcaatctcgctggaatgggcatcgtccctctatgcttcaaggctggggaggatgccgacactcttggcttaacaggccatgagcgctacaccatccagcttccgactg

SEQ ID NO: 6140 - DNA, 327 bp, Triticum aestivum
  Clone ID: LIB104-049-Q1-E1-E7
gagtcgtattactgtgcattactatggcaaggtagtgtggtgaagcctgcctttcccaggtggttcggtgtgcgtaagtgccagactgaggctgctgccaagaaggtgtttttagataccaaagttgcagactactgggacatggctgtcaacttcacggaagatttgtcctgagctaaaatttctgttgatgacagtgagagcgatcgctgcggatcactatactttgtaatgtcaccaacatgccatttttagacatgtggtgaattgaacgcataaaacggctgtcggatttttgcaatatgctttcaaaaaatagctacaaag

SEQ ID NO: 6141 - DNA, 235 bp, Triticum aestivum
  Clone ID: LIB104-049-Q1-E1-E9
ttcccgggtcgacgggggaaaatagtcgatgaaactggaaaatttctaagtcctgcttatatacacagagtattggtcccggttcgtggcaccaaccgggaccaatgcccccctttagtcccggtgtgtgccacgaaccgggaccaatactctgtgttcataagcaggacttagaaaatttccagtttcatcgaccattttcccccgacgacccgggaattcaggtctggaacct

SEQ ID NO: 6142 - DNA, 328 bp, Triticum aestivum
  Clone ID: LIB104-049-Q1-E1-F10
ccgggtcgacgggaaagttaagaaattatgtggaaggaaacttttgtgactattcccaggggggcaaatttccagcagggagacgtgcgtccaacaatctgggaattccaatcaggggataaacctgatgtattagcggcagccatggttttacaccatggtggttatggaatgacaatcctatgagcagcatagtaattcatttgaactttctcggattgcttcgaaatggattgaatcttacatgaagtgcaggacgatccagccacaaatatgttgacgattcaacatggtcatctgcacagaatacacatgctttcacaaattc

SEQ ID NO: 6143 - DNA, 297 bp, Triticum aestivum
  Clone ID: LIB104-049-Q1-E1-F11
gggtcgacggggatgatgcaccaacacatatccattaacgatgtgtgggtcaatgaacccaacatcatggatgttccttactctgcattccttaatcttcattctgcatgtataatagcggacacaacaatatagttaggacatatatatagtgcaagcaatatgaacgagatggggtagaaataaatcacttacagaacgtaacaactgatgatagatttgtcgagctcgcgcaaattgaaaagctggaacaattcactcagatgaatttgtacatagtaatgtttgaagtgatgc

SEQ ID NO: 6144 - DNA, 415 bp, Triticum aestivum
  Clone ID: LIB104-049-Q1-E1-F5
ccggtccagaattcccgggtcgacgggatattaaataaagtaacatgatgagattcacatgataatccaagtactagatactcaagacgtccataaccggggacacggctaaccatgattagtttatacactttgtagaggtttgcgcacttttccccacaagacttgatctcctccgttgggattttcgcactacatgatgtttgagaaacagatgaccgagacatactctttcaaaactgctagcaccttacgatcgggtagacagtaccatcctacatcccctacatctgctagtctaccactgtaagagttcgcatgacttagtcaactatgctagagaccatagtagcttgtggctgcacacggaagtttctagtatgaataatctcatgatccctttgagcctgggtgg

SEQ ID NO: 6145 - DNA, 304 bp, Triticum aestivum
  Clone ID: LIB104-049-Q1-E1-F6
gggtcgacgggaggtggcaaagacaacgatacgatccggcaaccctgcatgcagatccagaaatgcgctgccaacagggtttggctaaatttccaaatttttgcccgtgactatctatagcgcgatcctgtcggtgtgctggaatggcacaactcagtggcaccaatatgcacaacagtagacacttacaacacatctgtgtgaccgagtagttaacttcggttgcaccaatattgaacatctacatagacgtaatgatcactgaggcaccgacaatcgacgaatcggtcacacacgataatca

SEQ ID NO: 6146 - DNA, 399 bp, Triticum aestivum
  Clone ID: LIB104-049-Q1-E1-F8
gggtcgacgggatatccgaaagagaaggaagtgcagaatagatgtgttaatctgaacataaaagaagagttagtatgtagttctagcacatcaaatacaacaggtttctcaagctctacatttagtgctttacgaaagattgacaaggacaagatggccatggcgttggggtccctgcagacaagtaatccaactatttcaagtttccagtgcacacagtccttgagtcattcatctgaattatcatgcccttctcgaatatcaacaggatctaccctaccttccaaaactactaaggaactgtttggcattgagactgaatactgtgtggccaaggcttcatgtgcccaggttagtcaactggggaaaccttcttcaagtcaatccaatgaagtctcc

SEQ ID NO: 6147 - DNA, 393 bp, Triticum aestivum
  Clone ID: LIB104-049-Q1-E1-G2
gggtcgacggggcaggacaggcaggggattgagtcacctgtccaatgggaaggcgccgcgtggagaagcgtccacgtggcccgccgtggtgggcgtggtgcgttggaggcgtgagaggcgaggtcgtgacatgcttcgtgcgcggacaacgcaacgcaacgcaaacagtctcgccgttgccacacacgtcactgtgtacggactgtcaacggtcaacgtttgtaagagtggagatggtgcgcttttggaaaatcgagtggtgcggtgtttgttactttctccattcacagatataagatgttctattattttactttttttcgattcagacttatttaaacacattttagagcccgcttgaaatggatgtaagtttatacacctgtatttatt

SEQ ID NO: 6148 - DNA, 398 bp, Triticum aestivum
  Clone ID: LIB104-049-Q1-E1-G4
ttcccgggtcgacgggggattcgaggtgagacggctaatggctggtgtgatttcgcatggaggactcgactcgaggggggattacggctggagacgaatgagggctgaggatttagggtttggaggggaggggaatataaagggacaaagctgagtggtaactgggccgggcctcgctgcgtaagaaggccggagtgatttctcccgttttctttctttcgttctcttgttctccttttcggcctgcaaagaaacaattcggtcttctcaaaagaaaaagaaaaaaacaattcggccccctcaaaaggaaacatacaaatgtctcaaagacaatacaaataatttggcaacgccttttcagtgcgtcgtctgagtaggacttgccggcgctgccaact

SEQ ID NO: 6149 - DNA, 392 bp, Triticum aestivum
  Clone ID: LIB104-049-Q1-E1-G5
gggtcgacggggtcgcatctagatttgcacgctcacgcttaaagccttcgcggtcgcggaatctgtgacagacatggagtcgtcgttggcaacgggaccggctgctgtacgggatatgcagtgcgacctcgagtcccaagccaacgccctcagcaagatccagaccgacatctccaataatcactaggtccgcatgcagttcaccatccaggtcggcgagaatgaactcgtcctcacggagctggagctgctgaatgaatgggctaacgtgtacaagctgatcgggccagtgttggtcacacaggacaatgcggatgctaatgccaacatcaaaaagcgcatccagtacatcacatctgagctaatgaaaacggatcgggcgcttaaggact

SEQ ID NO: 6150 - DNA, 400 bp, Triticum aestivum
  Clone ID: LIB104-049-Q1-E1-G7
ccgggtcgacaaggatgccatagggaacgactactactcgtcctatggggatgattccgagtggagggtgaagctttggctcttcgtcgcctacgtcgtctctttcgtctgcctggctggatcggtgggtttgttggtgcaagacgccctgacagacaagggcccttctgtgtggactggtgttgccggcgttctgcaatgtgttttcgtgttgataagcgggttgacatactggacgtgccacaccgaggattaagggtcaaaaatctcgcgaagacagacgtctagtctatacccgtgtgtggtcctgtgtaaaaaaatatgttcattccagggcgggattacttggtgtccgtgtgtgcatagctgaccgcttcctgaaatggacccctagcatcag

SEQ ID NO: 6151 - DNA, 392 bp, Triticum aestivum
  Clone ID: LIB104-049-Q1-E1-H11
ggtctagaattcccgggtcgacgggaagaggcaatcaatggtggaaggaatacagtgcgtataatccatggactcaacattactcataaagaactcatatacttactgcaaaaatctacaagttatcaaagcaaagtattacgctcatgctcctagggggatagattgctatgaaaataccatcgctcgtccccgaccgccattcataaggaagacatctcaataattaaatcatgctccaacttcatcacataacggttcaccatacgtacatgcaacggaaatcacaacctttatcacaagtacctctcaaattcacaactactcatctaccatgactcaaatatcaccatctttagacctcaaaacaattatcaaccatcaaacttttt

SEQ ID NO: 6152 - DNA, 413 bp, Triticum aestivum
  Clone ID: LIB104-049-Q1-E1-H12
cgggagattggatgtgtatgtctatgcgtatgtgtacgttccacggtatttaatctagtagccaattcttttgcatttcaaaaaagaaaaaaacaaaaaagttaaaaaaaaaaaaaaaaaaacacaagaaccaaaaggggaaaaaaagcaaaagaaaaaaaaaattacacaaccaaaaaagaaaaaaaaaaaagaggggccgcccaaagggttccaagtttacgtccgcgtgaaggcaaggtcaaacccctccaaaagggcccccaaattccaatccaggggccgccttttaaaaacgtcgggacgggaaaaccccgggggtacccaatctaaacccccttgcaacaaacccccctttcccaaccgggggtattaccaaaaaggccccacccgtttccccttcccaaaagttg

SEQ ID NO: 6153 - DNA, 406 bp, Triticum aestivum
  Clone ID: LIB104-049-Q1-E1-H5
ggtccagagattcccgggtcgacgggtcgccctaaagtggcatatgaaatggacgaaggaagaaatttagcaacacttttcccgcaggatctcttgcaagaagaaaataatctccaaattcgacttgtcaattttatttctcatgaaaatagcaagttaactcaaagaatttatcacacaaatagtcaatttgttagaacttgcttagtagtgaattgggaacaagaagaaaaagaaaaggctggtgcttcccttgttgaggtaagagcaaatgatcttattcgcgatttcctaagaattgagttagtcaagtccactatttcgtatacacgaaaaaggtatgataggacaagtgcaggaccgattccccataataggttagatcgcgccaatatcaattcttttt

SEQ ID NO: 6154 - DNA, 186 bp, Triticum aestivum
  Clone ID: LIB104-050-Q1-E1-A12
tcccgggccgacggatcaaaaaaaaaaaaaaaaaaaaaaaaaaaaaaaaaaaaaaaaaaaaaaaaaaaaaaaaagaaaaaaaaaaaaaaaaaaaaaaaaaaaaaagcggccgccccaaaggttccaagcttactttcccgtgcatgcaacgtcaaaacccttccaaagtgtcccctaaattcaatt

SEQ ID NO: 6155 - DNA, 411 bp, Triticum aestivum
  Clone ID: LIB104-050-Q1-E1-B12
ggtcaggaattcccgggccgacgggttatggactatggaataaggagtggcaagagcctaagcttggggatgcccatggaaccccaagatattcaaggatagccaaaagcctaagcttggggatgccccgggaaggcatcccctctttcgtcttcgttcattggtaactttacttggagctatatttttattcgccacatgatatgtgttttgcttggagcgtcgtgtattatattagtctttgatttttagtttaccacaataatctttgatgtacacaccttttgggagaagcctacttgattagaatttgctagaatactctatgtgcttcacttatatcttttgagcttgatagttttgctctagtgcttcacttatatttttgagagcacggtggtgatttaattt

SEQ ID NO: 6156 - DNA, 418 bp, Triticum aestivum
  Clone ID: LIB104-050-Q1-E1-C10
aattcccgggccgacgggttagagaatgggcatatcttttgtagaaataattaaactctcttgcttcacttatatctatttagagagttgccaggaattggtcattcacatggttagtcataaaatcctacataaaacttgtagatcactgaatatgatatgtttgattccttgcaatagttttgcgatataaagatggtgatattagagtcatgctagtgggtagttgtggattgtagaaatacttgtgtagaagtttgtgattcccgtagcatgcacgtatggtgaaccgttatgtaacgaagttggagcatgaggtatttattgattgtcttccttatgagtggcggccggggacgagcgatggtcttttcctaccaatctatccccctaggatcatgcgcgtaatactttgttt

SEQ ID NO: 6157 - DNA, 371 bp, Triticum aestivum
  Clone ID: LIB104-050-Q1-E1-C12
ggtctagaattcccgggccgacgggaggttcaagggagagaagcgacggagttagaagttgtaaatatgcattgttgtatcgcgacctgaatgaaataaacgaaataatgctcttgttcaatcggcaaaaaaaaaaaaaaaaaaaaaaaaaaaaaaaaaaaaaaaaaaaaaaaaaaacaaaaaaagaaaaaaaaaaaaaaaaaacatacaggcgactccaaaggactaatacatagttacccaaaatataatacatcaaacctcgtcaatagaagccacctaaatgcaaataactggccgttattaaacaacatcgtcatggagaaaaacctgctttcaccaactgtagtagtattgaaaaagatcccact

SEQ ID NO: 6158 - DNA, 401 bp, Triticum aestivum
  Clone ID: LIB104-050-Q1-E1-D12
ctcccgggccgacaaacccacgcatgacgaagaatgccgccatgagctcgtgatcggacggaggcgtggtgagtgtcagtgtttattgttactggaatgtgagcgtggcagaagtagaaagccggatcgtgaatggtacgcagagcacaacggggttccgtccagttttcgttggcgctcggagggatctggagagactaggggaggatccctgggccggggcttagtgctttgatcagtgaaagtacgcaacaagaaatcatggtttgaacaattatgtatcacaacaaattaatttggaggacaacaaatgcaaaagtcttcaactcacaggactgagcgaccagccgggaggctcttcaaggtgagggattactgcaagaccataactaatccccttg

SEQ ID NO: 6159 - DNA, 417 bp, Triticum aestivum
  Clone ID: LIB104-050-Q1-E1-E12
ggtcaggaattcccgggccgacgggatattcatcgagaccccagagacctggaggactgccattgaagcacttgagaaggatattcaggcagtgcgggaactaaaagagaagaatttggtgctgctgacataggcatcaacagccgaagcggtggtgctccattttgtcaggtttctaggacaagtggctggaatgtcatactgctggtttgctttgtcttcgaaatgtttgggatagtaccactttgttgtcgttgtagtgctgatatttcctgctgtagctgtttgtaggctggttacctgcatgtgttcctcgagttgtctgataaccggcgcacattgtggttgctgctacttgctgcgttgtgtctttgtgtggtatcttactggagttgagatgttatctgttgcgttgtg

SEQ ID NO: 6160 - DNA, 318 bp, Triticum aestivum
  Clone ID: LIB104-050-Q1-E1-E5
tcccgggtcgacggagatgcgaatcgctacgtctccgtcggctacaaggaaatctctgttggacaggagtacaacaactccaaggacaatttcgccaagaaatgcacattagcgaaggtcaggagaatggcgaggttcatcatcgacaataagacgaccattaggatcgtcgatgtgacaacgatgatcatgacgacgattgccaagatcacaatgcagccgaccactatgataatgatgatctctctgccgtctaccatggagattgacttcactacgatgattatgactattaagaataagaggaaaattacgact

SEQ ID NO: 6161 - DNA, 405 bp, Triticum aestivum
  Clone ID: LIB104-050-Q1-E1-E6
tcccgggtcgacgggtccgccaacggccagccgaatcgacggagaaggaatggcttcaaccaggggagacgtaggatgggagttcggccccggcgaactgatagggaggatagtgtacggcgaactgtctatgtctcagacattgatcaacatgtcactgaacagaaacttgctgaggttttctcaaactgtggtcaagtggtagattgccgtatctgtggtgatccaaactcagtgatgcgttttgcttttatcgagttcgctgatgatgtcggtgcaagagcagctttaacgcttggtggaaccattcttggtttttatcctgtcagagttttgccatctaagactgctattttgcctgtgaaccccaaatttcttcctcgaacggaggatgagaaagaaatg

SEQ ID NO: 6162 - DNA, 392 bp, Triticum aestivum
  Clone ID: LIB104-050-Q1-E1-F10
aattcccgggccgacggggcatggatggacgtgccgcccatgcgccacgccatcgtcgtcaacatcggcgaccagctggaggtgatcaccaacgggcggtacaagagcgtgatgcaccgcgtgctcacccgccccgacggcaaccgcatgtccatcgcctccttctacaaccccggcgccgacgccatcatattcccggccccggcgctcgtgggcgccgccgacgctgctgagaggaacgagggcgaggagggcaccgccgtgtacccgaggttcgtgttcgaggactacatgaacctgtacgtgcgctacaagttcgaggccaaggagccacggttcaaggccatgaaggcagacgccgcgcccatcgccaccgcgtgataacgccgcgc

SEQ ID NO: 6163 - DNA, 417 bp, Triticum aestivum
  Clone ID: LIB104-050-Q1-E1-F12
ggtcaggaattcccgggccgacgggtagttcattatgttaaacatgaaattgttgctattgcacccacacatgatagtcctattatctttttgaactctccctactacactatatcggagaagtttgtgcttactaaggcttatattgatgggttgccttttaccattacacatgatgattttgatagatataatatgcacgtgcttgctgctcctacttgcaattattatgagagaggaactatatctccacctctctatgtttccaatatgataaaattgcaataaactgtttatattatgcattggcctttactatgtgtgcatgaattgttcttttatgacatgccgatgcataggaagagagttagacttcgttgttgcatgatatatgttactttgtgctcactactaaat

SEQ ID NO: 6164 - DNA, 377 bp, Triticum aestivum
  Clone ID: LIB104-050-Q1-E1-G10
ggtcaggaattcccgggccgacgggaatacaaatgcacctaaaaaataagtattgggaaggaaatttgtcctgcagagagtatatacttggaaaattgtcaacagactttcctgtttcgtaatatggcacaggactttattatctttttaatgtgacgaagaactaatgtagcgtagtttagccaggatgtatgactgttatccaaagagcatcaatgaagagctaaaaggtctattgtattccaaaaaaaaaaaaaaaaaaaaaaaaaaaaaaaaaaaaaaaaaaaaaaaaaaaaaaaaaaaaaaaaaaaaaaaaaaaaaaaaaaaaaaaaaaaaaaaaaaaaaaaaaaaaaaaaaaaaaaaaacacatattggat

SEQ ID NO: 6165 - DNA, 387 bp, Triticum aestivum
  Clone ID: LIB104-050-Q1-E1-G11
aattcccgggtcgacgggctgctaagtcgtgcatgtgtgtctgtgttttttgtttgttctttgcatgctccgggcgccaagcggccgtatcggctcggctgtacgcgtctgctgacgtcacgtaggggtgtgggtatatgctatgcatcatatgcccaaaatgcccttagacatggggggtaccgaagcaaacctcattgttcaaatatgtccaggttgttgtcgaacccttatgttgggagaatatgagaactctaggccaaattagccttcgactatctatacctaatattataagacggatcctttcatagttcttcatctatcgctcttttgtatccgttgattttatgttaacaaagatattaacggccgacatttaaaact

SEQ ID NO: 6166 - DNA, 304 bp, Triticum aestivum
  Clone ID: LIB104-050-Q1-E1-G12
tcccgggccgacaaagctataatcaacgtgtgactgatttggtttattaagggtgtccagttgtgtgaaagtatgctacattgccccgcttgataagcaagtaatactcatcctttcatctatgcatggccgtttaactcttgtcttaaaaaaaaaaaatgaaaaaaaaaaataaagggtaaaaaaaaaaaagaaaaagaaaaaaaaaaataaaagtagaaaagcggccgctcaagaggatacaagcttacatacccatgcatgcaacgtcatacctcttcaaaaatgtaacctaaattcaatt

SEQ ID NO: 6167 - DNA, 403 bp, Triticum aestivum
  Clone ID: LIB104-050-Q1-E1-G6
cgggccgacgggtactgtaatcagaataccagagatctccaatgggacgacgacatggatgtggatgagtcagatacaaggctcttacatgaggaaaacaaactcgatatcacaaaacgacaacacactcctattggatatgaggtggcatgcaagaatccaagcatagctcaacgttcatggtgcctcggagaacatcctgaggctggagggatatcgaattcctcctgggtctgataacaggtgaatgcagtaaacaccataaccatcagtactatgatctggaacaatatcatgaataaactattttctggattatgaatgaattctgaaacatggtgctataagtgaattatgttccatggatttgtaactatggtgaatgtcaagttaacgttccatc

SEQ ID NO: 6168 - DNA, 334 bp, Triticum aestivum
  Clone ID: LIB104-050-Q1-E1-G7
ggtctagaactcccggttcgacgggtactgtcatcaggtttccagcgttctacaatgagaaaatgagatcgatgcagatgattatggtaaatggtcatacgtcgggaaatcaacctgtatatgacaatcaggcaacacgcccctatttcatatgaggcagcacgtcaggatccaagtctagttcaacgtgcatggtacgtcagaaatcatccagaggctgaagggatttcaagtcactcgatggtccttttaacacgtcattacagtgaacaccaatatctttctgtatcataatcaggaagcatatcatgactcctgcacaaactggattatt

SEQ ID NO: 6169 - DNA, 408 bp, Triticum aestivum
  Clone ID: LIB104-050-Q1-E1-H11
ggtcaggaattcccgggccgacggggccagaagtggtgggtctaaaactcccgaaccccctagaacaggacacgcccccaccgaccggcggcgaggaagaggaggaggacatggcggcggcgcgggggcaaaaggcgctggcgacgctggtgaggtcgctgcggagcgattccatctccaactccaacgctcccaggctcaggcacctcccgtctctcatgaggaccttctcgctctacgaccatatcaacctcatcgacaccgtccccgaagaccagctccgcttccaaacttacgatgacactggattcatgattaacaatgtaaagtatgaagggagcttgctgatagtagaaaacaagataatgacctggacacccaaaacatttgcggatataactgctgaaa

SEQ ID NO: 6170 - DNA, 405 bp, Triticum aestivum
  Clone ID: LIB104-050-Q1-E1-H9
ggtcagggactcccgggccgacgggatgatgaacgctcttgcctatcttgggcttcgtgacatcctagctacagagatggtgtgcaagtctttgcattcgtggatccgcagcgagttatcgtggaagtgtatccacattgaaccggtattgagcgggaagatctctgatcctgatcgtctatttctgacacagaagattccaggtgatttgcagtgtctaaatataaatgactgcataaatatcaccgacaatggtttgaatgctgttctccaaagcaatccgacgttaacaaagttgagtattgcacgctgcccgcggttaactttggatggccttattgccaatctaaagtcatttaatatgaaagcagtgtcgggtattaagagcctcagaattgacaaaaa

SEQ ID NO: 6171 - DNA, 439 bp, Triticum aestivum
  Clone ID: LIB104-051-Q1-E1-B10
ggtacaggtcaggaattcccgggtcgacgggaaaaagaactcgaccagcagaaacagaggacgatgtgctctcggctgaggacggagctgttgcggccgctccgcgtggcgctggtgaaccggggccccgacgcggagctgctggtggcaaacccggtggaggtgtccgggaagggtaggccgctggtgttctatgacatcaccctcgcgctcaagaacctccatagacgagtcttcttggccgagatcgggaggcatgtggtggacgacagggagtgggaggtgtacagggtgcacctgggcgaggacgaccacgagctctcgtgctcggtgcggagcaagattgtcgatggcgtcaccaacatgctcatgggctgggactgactgaccgactggtcacaccatgcatcttccttgacatattcagtcttgttgcaaa

SEQ ID NO: 6172 - DNA, 445 bp, Triticum aestivum
  Clone ID: LIB104-051-Q1-E1-B12
ggtacaggtctagaattcccgggccgacgggacgcaaatttttgatgtagaacactctctctaattccttacggtttaagagcagtttcgattttaccgaaaagcggacactctgttctgcgcgagaccaaaatcgtcgtatgtactgcatcggacagaagaacgcattgcttcagacaaacgcattgcttcagacaaaataccgcactgcatcagatgggcaagtgcactgcatggtttctttttgtttaaacgtattttttgtcggacgaggaaagaagaacgcactgcttcagacgaaataccgcacttcatcacaagagacaagtgcactgcatgattttttttgtgagatgtaaattttcccatacgagtttttgtttttgttgtctttttttcaactttcttttatgaacgagaagtggacgcaaagacaaggggaaat

SEQ ID NO: 6173 - DNA, 450 bp, Triticum aestivum
  unsure at all n locations
  Clone ID: LIB104-051-Q1-E1-B8
ggtaccggactgcaattcgcgggtcgacgggggggtcattcgtgctcttcactctggaggagttttggaaaaggccttctgcactgaaactcgtccatttaaccagggttccaggcttacagctttcgagttagttcatgacaaaatacctgcgacgctgatagcagactctgctgcagctgcacttatgaataatggacaagttcaagctgtaattgtgggtgctgatcgtatagctgcaaatggtgacactgccaacaagattggcacatacaacctctcaatttctgcaaagcatcacggcgtgcagttttacgtggccgcaccagtaacttcgattgatctctcccttccgtctgggaagcaaatcgtcatagaagaaagatcttcaaaggaattgttgaactctgaaggtggtctangaaagcaggttgccgcgtcaggtataca

SEQ ID NO: 6174 - DNA, 443 bp, Triticum aestivum
  Clone ID: LIB104-051-Q1-E1-C10
ggtacaggtctagaattcccgggccgacgggggaaagcaacaagaggcaatggatatcgtttcacacttaaagttggggcgttccctaccgaaaccatcatgcttgttgtgagaagctctggtttgtgataagcatcttcccaaacctgccccaaatgggacaaaaaatttaccacggcatgatgatgcggctccattatagcatgccaagttacatgaatttcagacgagtgtcggatttactagattttataaactaggcatctcaatgtttgtggcagggtgtttgacattaattcccatttcttgcatgggacctaagcatgcacccaaggacaaaagatttgatttttcaaccaatttatatgcaccggagcatgtgcatgtagttccaatttgcattatgcacataaatgcattgaaaactcacttaatgcataaaa

SEQ ID NO: 6175 - DNA, 430 bp, Triticum aestivum
  Clone ID: LIB104-051-Q1-E1-C11
gtacaggtcaagaattcccgggccgacggggaggttaagaagctgattggcaggatagtgaagtggctgaagcccggtgggcatattttcatcagggaatcgtgcttccaccagtctggggattccaagaggaaagtgaacccgacgcactaccgggagccgaggttctacaccaaggtgtttaaggaatgccactcctatgaccaagaggggaattcctttgagctttctctggtaacttccaagtgcattggagcttatgtgaaaagcaagaagaaccagaaccagatatgttggctgtgggagaaggtcaagtgcacagaagacaaaggctttcagagattcctggacaatgtgcagtacaaatccactggaatcttgcgttatgagcgcgtgtttggggagggttatgttagcaccggtggattcg

SEQ ID NO: 6176 - DNA, 422 bp, Triticum aestivum
  Clone ID: LIB104-051-Q1-E1-C12
ggtacaggtccagaattcccgggccgactcgtcgtgaaagccgacgctgcgaatgcgcttgtgagagcccttgcgtgcccgtgagagctcgttcgagggatccgcggcgcaccgggacatctctgttccagctgtggcttcgccgcaggacctctctagtgcttccgcggccttggtctttgctgcctggttatatgtccaccctaaactcctcctaccggtcatggtggaatgacttgacaggaaagaccggttttgtgggtgatgaggagaggaactgtgaagtaattttcgagtgggtagtttttatagcccagtgctaagtgtgaacgcatattagtttgataggtgtgaacagatttgcaattacttattacgttgtaatctgcaatgtgacgagaaacaaggtcaaaattattgat

SEQ ID NO: 6177 - DNA, 398 bp, Triticum aestivum
  Clone ID: LIB104-051-Q1-E1-D11
ggtacaggtcaggaattcccgggccgacgggcctcgaacgccgctggagaatcgccttcgatcgggatggccgccagccgtgaagcggcagcgacaatgttgtccattgggttagaatagtgacccggtggtgtggggacgtgcggtgccacaatgttgttctgacgaggcggatccaccaaacgtggttgaactggtgcccctgctccaggtgcctccgcccggtttaccaccggcggattactggtccctgctcctggggtgttaaagagatttctagcgtcataaaccggcggcaggtgagatcggtgcctcctcttcaggacttcgttcgacgcactctgatccagcataatccggtaagcttgtgcatccaaagcggcccgctccgcgactat

SEQ ID NO: 6178 - DNA, 390 bp, Triticum aestivum
  Clone ID: LIB104-051-Q1-E1-D12
attcccgggccgacggggaagagtatccatcagcacgatggcgtggtgacgatcttgatgttcaactgtcgtagggcttcgcctaagcaccactacaatattatcgaggattatggtggaagggggcaccgcacacgactaagaaaacgatcatgtggatcaacttgtgtgtctaggggtgccccctgcctccgtatataaaggagccaagggggggtgcggccggccctggtaggaggcgcgcaggaggagtcctactcctaccgggagtaggactcctactcctaccgggagtaggactcccctccctttccttgtccaagtaggagagggggaaggaagggagagaggaggggaaggaaaggggggcgccccccacccccggctggc

SEQ ID NO: 6179 - DNA, 377 bp, Triticum aestivum
  unsure at all n locations
  Clone ID: LIB104-051-Q1-E1-D2
gtaccgcagctacagctacgacgagtactacaagaagttctggagcaggaacctggaccaggaccattgcctggagctcttcacgggtcagaagtgatccgtgtgcacaagcttgcctcatctacggctgggtgcagtggacatccacgacgtagcattactcaaataataaatgccctcaatgtgcggggttactcgagttgtttgaacttgtttttgcttgagcacaacgtatttattgatgtccatcttgtattgtaatccctatatactagtgggtgtgcgcgcgcgcttgttttaattgtgatcctactcgtaatgaattatggtactacaacatagnnnanattanagaaaaaaaagcggccgctctagag

SEQ ID NO: 6180 - DNA, 454 bp, Triticum aestivum
  unsure at all n locations
  Clone ID: LIB104-051-Q1-E1-D7
ggtaccggaccagaattcgcgggccgacgaggcgacgtgcggggagctggatgttgttgacagggtgctgctgctggagtggttcgccgagaactaccagcagtacggctgcaagctggagttcgtcaccaacaggtcccaggaagggtcgcagttctgccggggcttcggcggcatcggcgggatcctccgctacccggcggacgtcgccgcctatgacgacgacgacgacgacatgctggatgacgacgtctatgaagacctcgaatagcaatcaactgaagcttcagtgcacacggtccgggaggagcctgtgctggccacgaccgcgccgggacgagaccctgaaacatccaaacgatcggtgcangggaaacaaggaggtggagagaagaggatctaagcaattgcgcaatccagatgttgagccaggcatgatgatagcgtcgatgct

SEQ ID NO: 6181 - DNA, 419 bp, Triticum aestivum
  Clone ID: LIB104-051-Q1-E1-D9
gtacaggtcaggaattcccgggccgacgggagtagtactgcctgcttgatgtatggtgtgtaccgctcatcgtaaggcatggcaggaccagagaccccgctgataccgagatcttcagaggttcaagcttctgcaaaaaacaagtaatgacaaatcttagggcatgtacatttcaactaaaggcaaatttgcaaaatatttagattactcattattaccttatccttcacgcgcatcatgtatgcccggtgttgcacgtcgtaaacatcatccaaaagccaaaccatccttacaatttcatacaataaacatataaaagttcatcttcatctcaaatatcggtatacactaaacatataacatgtgttcaactacaagaatctcaacatctccttctcacataatgaatatgtcatatg

SEQ ID NO: 6182 - DNA, 439 bp, Triticum aestivum
  Clone ID: LIB104-051-Q1-E1-E10
ggtacaggtcaggaattcccgggccgacggggacacgtacgggttagcacccggttactcctaacagccgatcctgaaagggtgcttaaggggatcagaagaccaccaccaccgccggccacctccaggtccgtgccggcggcatccttcgtgtctgctacatcgcctgctgatgcccttcctcccgacgatcttctcactgctggagatgctaaggtggagccaggggctatcctgttaatggatcaagataatcacgcaatgaacattaaaaatgatgccattttgtttgacatagacgaaccttatgcaaagaactttcccacatggagagtggagatcattgtctcatgtaaggaatctcccaatgtttttctgccactaaggttgaaggatgttaatcatgatgataaggcagacattgggagagatctcaaga

SEQ ID NO: 6183 - DNA, 440 bp, Triticum aestivum
  Clone ID: LIB104-051-Q1-E1-E12
ggtacaggtcaggaattcccgggccgacggggaacgtagccgtgaaggatctgaagcgtggttttgttgcatccaactccaaggatgaccctgccaaggaggcagccaacttcacctcccaggtcatcatcatgaaccaccctggtcagattggcaacggctacgccccagtgctggactgccacacctcgcacattgctgtcaagtttgctgagctggtgaccaagattgacaggcgatctggtaaggagatagaggccgcgcccaagttcctcaagaatggtgatgctggcatagtgaagatgattcccaccaagcccatggttgtggagacctttgccacttatcctcctcttggtcgttttgctgtccgtgacatgaggcagactgtggctgttggtgtcatcaagggcgtcgagaagaaggacccaaccggggcc

SEQ ID NO: 6184 - DNA, 424 bp, Triticum aestivum
  Clone ID: LIB104-051-Q1-E1-E2
gacgggtctatcaaacataagcctcattatatcttcctcaaaacagccaccatacctacctatttatggcatttccatagccattccgagatatattgccatgcaactttccaccgttttgttcattatcattatgacacgcattacttttgtcatattcccattgcatgatcatgtacttgacatcgtatttgtggcaaagccaccatgcattatttttcatacatgtcactcttgattcgttgcaccatcccggtacaccgccggaggcattcatatagagtcatatcttgttctagtttcgagttgtaattcataagttgtaatcaatagaagtgtgatgatcatcattattagagcattgcctaaagaaaaaaatagaaataacaagaatggccaaaagaaaaataggcccaaaaaaaga

SEQ ID NO: 6185 - DNA, 451 bp, Triticum aestivum
  Clone ID: LIB104-051-Q1-E1-F5
ggtaccggactagaattcccgggccgacgggtctcacgagttcttgttgagtttggtgtggatgaagcttttgataaaaagagaaaccgtgacatgaaaggaattaaggagacacaaaggttcaagcttggggatgcccaaggcaccccaaaataatatttcaagaagtttcaatcatctaagcttggggatgccccgttaggcatcccacctttcttcttcaacaactatcggttagtatcggttgagcctaagtttttgcttcttcacatgagttgtgctatccttgcattgttattttattttgctttgcttgatgtttgaataagataccaagatctgaaattctttaatgagatagagtctttgcatagttgcataattatttagctaccctttgatcttcacttatatctttcggagtagtttgtaatttgctctagtacttcac

SEQ ID NO: 6186 - DNA, 433 bp, Triticum aestivum
  Clone ID: LIB104-051-Q1-E1-F7
ggtaccggactagaattcgcgggccgacgggcggtgcagacgtgcccggagaagaagatgatccagcaggtggtgttcgccagctacgggaacccgctggggatctgcggcaactacacgtttggcaactgccacacgcccaaggccaaggagattgtggagaaggcgtgcgtggggaagaggagctgcgtgctggccgtgtcgcacgaggtgtacggcggggacctcaactgcccgggcaccacggccacgctggccgtgcaggcaaagtgctccaagaggcagaggaccgccgagcaataagtaacctaagctcacatatgtactgctatgtagatgatctcatcaccttgacctttttgcctttttcatgcttgttgtttgggatacatgttgtactcaggttgttgattcctgtgaattgttctaggag

SEQ ID NO: 6187 - DNA, 364 bp, Triticum aestivum
  Clone ID: LIB104-051-Q1-E1-F9
gtctagaattcccgggccgacatatctagatatcctcctttccagctctaccatctcagcttcatccctcattccttcactcagcagctcctcccagaagtcgtcagtcagttcggcctcaccgcagccttgatcccgtcgacttctgtttcagtctttgaaggtcctggatattgttaagcttgtttacttatgggcacttgtgtattggtttattgctgggcattatgccttgatattaaagatttccgcccagtacaaaaaaaaaaaaagagacaatacgaatccgactaaaaaggaaaagaaccataaagaaaaaaaacaaaaaaaaaaaaaaagcggccgctctaaaggatccaagctt

SEQ ID NO: 6188 - DNA, 410 bp, Triticum aestivum
  Clone ID: LIB104-051-Q1-E1-G11
attcccgggccgacggggagcacacgaaggacggcgagcacaaggagggcatgatggagaagatcaaggacaagatcagcggcgacggccacggcgacggcaagaaggacggcgaccaccacaacaccatcatcgcatcccattagcattctaccattttcctcggagagaagtagccagaaacagcagcgccatggccggcatcatgcacaagatcgaggagaagctccacatgggtggcggcagcgacgagcacaagaaggacgaggagcacaagaaggcggaggagcacaagaagaaggacggggagcacaagaaggacggcgagcacaaggagggcatgatggagaagatcaaggacaagatcagcggcgacggccacggcgacggcaagaaggacgggcgacaca

SEQ ID NO: 6189 - DNA, 442 bp, Triticum aestivum
  Clone ID: LIB104-051-Q1-E1-G3
accggtcaagcattcccgggtcgacgggggcggataccaaaaccatcgcactatataagatgcaataataaaagtaagaaaataatacaagtatctatgtaaacatacaagtaagaatatttttcctttcagaaagaagataagaacaagaggctcaccacggtggtgccggcgatgagctcggcgcgggtgatcgacggcagtgaagacggggacggggcgtgacaaaccgctaaacctagacaaatattgaggaaaatggagcttggaggtcgagcttggagaggagaaaggttaagtagtgtggctcgggcattccatcgaacaccttgtgtgcataggaggtgagctagagcaccaccaagccctctccccctgggccagaaaaaacagagtagtgtgctctgctcttacgcgagggggtatatataggcacctcatt

SEQ ID NO: 6190 - DNA, 452 bp, Triticum aestivum
  Clone ID: LIB104-051-Q1-E1-G5
ggtaccggactagaattcgcgggccgacggggcgaggcgcctggaaagatggcctcggtgtgaatctgggtggcagggcggtgtggggtacccacacgcggcgcttctgaggaccagcaccggatgaggaacccgtgtcacgtccatgcttgcgtgttgcgtcatagtcagtctgaccagtttcagcactgatggctttgttgacaagtttcgaaaaagatgtgcactcatgcagacggaggtcgcggcgaagctcaggactaaggcccttacggaaccttgcttgcttcttggcgtcagtagaaacttcctcagttgcatatcgggcgagattaccaaactccctgctataggcatccacagaaagtcggccttgggtgaaactgcaaaattcttcacgtttacggtccatgagaccctccggaatgtgatgttcacggaaagcctcgctg

SEQ ID NO: 6191 - DNA, 434 bp, Triticum aestivum
  Clone ID: LIB104-051-Q1-E1-G9
ggtacaggtcaggaattcccgggtcgacgggtaacaactcaattggctttgaagaagcaataaccgttcgtactaatgaatacagcaagaattacaagacatggaaagataagacaacgaaaacattgttacaaagcaaacatatagtttcaaatcaattaactattgaagctaatgtgcccaaaagaatctaggagtataactacctacttcaaaggcatatttatacagttcttctacattttatactatcccgtgcgaatgcatgggttgacgactagtgagagtaactcttcaactcatacattgtttaattccccttcatgcttatcgaaggatgaatggtatgatgattgttatgatcctgttgattcttttgaaatatcgctttttgatgatgcttgttatgcttgtggccaagatgccaatatgaa

SEQ ID NO: 6192 - DNA, 397 bp, Triticum aestivum
  Clone ID: LIB104-051-Q1-E1-H10
gaattcccggccgacggggttcggaggctgataagctcaagccccctgtggagccatgatttttgcagttgagagatggatccttcctgtgtatgtatcgctttgctaaagcctgggtggtgctcacaaacacttggcacttgtgtgattcttttgtccatggatgtactgtgtacaacaagttgatgggaatgtgatttggtatatgctttcagttgaaaaaaaaaaaaaaaaaaaaaaaaaaaaaaaaaaaaaaaaacacaaaaaaaaaaaaaaaaaaaaaaaaaaaaaaaaaaaaaaaaaaaaaaaaaaaaaaaaaaaaaaaaaaaaaaaaaaaaaaaaaaataaaaaaaaaaaaaaaaaagggggccccccaaaaggtttaaccttttttttc

SEQ ID NO: 6193 - DNA, 439 bp, Triticum aestivum
  Clone ID: LIB104-051-Q1-E1-H11
aggtacaggtcaggaattcccgggccgacgggcagtgtagtcaccttggttggactggggccttcgtcctcacttcattaaaccacgtcgaggaattcggcgtcactctgccggcctttattgctatgctatgtcaccactccggagtgccgagctcttcgatctgccacctcgggaccggcttgggggctgggacctcatcccgatgtaagctcggactgcgtcatcaatgccaaacacaagaaccagctaagtcgctcttatgctcaaagttttaaaaatttaaattttgttcggttcgaccaagcattatacttttttggcaaagagttgtttgtgaaaaacttccttgtcaaaactttgtttgtgacacacaaattcaaataccccgtttacttgggggcttcctttatgaagccttccatcttgcatatgatta

SEQ ID NO: 6194 - DNA, 452 bp, Triticum aestivum
  unsure at all n locations
  Clone ID: LIB104-051-Q1-E1-H5
ggtaccggactagaattcgcgggtcgacaagcggcagtaactaccagacagaggaggatgagactgacactgcgattgactttggcaacctcttgccccgagcgcctcggaagcaccggagcaggagcgctcatccccgtgaaggaggagggcacgacgacgaagagaggatgatggataagcttctgagacactacagcaagaaggggatggagagggaggaggagcacaagacgaggtcgaagtccaggacccctcggcctcgagcagatcgacctgctgatggcaacaacagagatggagcgcccagtcatccagagagaaccgcatctctgcctacagaatcaggttcaccggtggggaggacgaaggctcctgcccctgttcggtccacctcgctgcagcaggacacgttcagggggaacgtgcnaccgaagatgccggattttgac

SEQ ID NO: 6195 - DNA, 425 bp, Triticum aestivum
  unsure at all n locations
  Clone ID: LIB104-052-Q1-E1-A1
attcacgggtcgacggggtctgttcgatcttctacagaatatagtcctcatcagagatcccgaggactccacaaagtactatccccgctttaacctggaagatacttcaagttttagggacttggatgaacatagcaaaaatgtccttagaagattataccatgactattatttcgttcgccaagaaaatctttggcgacaaaatgcactgaagactctacctgttctattgaactgttcggatatgttggcatgcggggaagatcttggccttatccctgcttgtgttcaccctgttatgctanaactcgggttgattggattgcgtatccagagaatgcctagtgaaccaggcttggaatttgatattccgtccaagtacagctatatgacggtttgtgctccctcatgtcatgattgctcca

SEQ ID NO: 6196 - DNA, 432 bp, Triticum aestivum
  Clone ID: LIB104-052-Q1-E1-B11
ggtcaggaattcccgggccgacgggactaagagtttactccactggaaacttcactatttttaggggatcggttagaaatgcccttagtctacctttctttacaatatactacatctctttctgaaggactctaaagataaagcttgttccacattgaggaggacacagacatttcgttgttagacatcactagtagaaaagggggtattggtccaggccgggtcagcccattagtcccggttcaatccagaaccgggaccaatgggggcattggacccggttcgtgagccccgggggccggccgggccacgtgggccattggtcccggttcgtctggaccttttggtcccggctggtgggatgaaccggtaccaatgtggcttgctcctgggccaccaccattggtcccggttggtgccacgaaacgggaa

SEQ ID NO: 6197 - DNA, 430 bp, Triticum aestivum
  Clone ID: LIB104-052-Q1-E1-B9
ttcccgggccgacgggcgggaaagggctgaacgcgacgggcgagtttttccggcgccgtgacgagtggaggaggcaccccatggtggggaaccagctgcgccacgccactccggggctaggcatcgccatcgtcgcctttggtatctaccttgtcggcgaggccgcctacaaccgcctctaccgccgcgccggcgacaaccaccactagatctcccccagaggtgaagtagatggagcaaaccaatgttgatcttttccggtttgatctcataaggtctgcatgaccaccttgtaattcgcgatcaggagatgtgctgttggtccaactagtgttcctggaacgcgtgtcctttaaatctgatactccctccgtccgcaaatacttgtcggacaaatggatgtatctagacataatttagttctagatac

SEQ ID NO: 6198 - DNA, 422 bp, Triticum aestivum
  Clone ID: LIB104-052-Q1-E1-C10
ggtctagaattcccgggccgacatcactaaggttaatgtgcagaagtttgatgacaagtactttgctagggagaagaagactagggcaaagaagactgagggcgagctatttgagtcggagaaggaggcaaccaagaatttgcccgacttcaagaaggatgatcagaaggccattgatgccgagttgatgaaggctatcgatgctgtcccagaccttaaaaattatcttggtgcccggttctccctcagggatggtgacaagccgcatgagatgaccttctaagttacctggtacaagtttcaagatctgtggaagtcttttttgtctagtgtgtgtgctggttctgtacttctgatttcttttgcccggttggtgaatctttgatttccactgaagtctgcctgtcaaatattttgagaag

SEQ ID NO: 6199 - DNA, 408 bp, Triticum aestivum
  Clone ID: LIB104-052-Q1-E1-C12
ggtctagaattcccgggccgacgggggggaaagaatgatggactctatatgatggaagttgatagggttctaagacctggcggatactgggtgctgtcaggtcctccaattaactggaaggcgaactacaagggttggcaacgtacaaaggaggatcttgaagcagagcagaacaagatagaggaaatggctgagcttctatgttgggagaaagtctcggagaagggtgagacggcaatatggaggaaaagagtaaatactgagtcctgtccatctaggctagaagaatccactgtgcagatgtgtgaatcaacaaatgcagatgatgtctggtacaagaagatgaaggcatgtgttacacctcttcctgatgtacaaaatccaagtgaagttgccgggggagcaatc

SEQ ID NO: 6200 - DNA, 405 bp, Triticum aestivum
  Clone ID: LIB104-052-Q1-E1-C6
attcccgggtcgaccgtacaaatcaaggtgaaatctgtccaatcaatttttgttgatatattttttattaaaaagccaaattactccggcttgtgatattgtttatgcagagcaattacttactgcaagagcggtggcgacttgcctgcgtccgtactgactctaatgacaacagtcgtctttaccgtccgcctccgcggtttggtgtatatcaacacattggagctgcactgtctgcatgagctgtttattgagtgcaagaaagtcactcctcgggtagcccggttttttcttccaacaatttgaaggctaattactatatattatcaaccaccgtctgcactagatggctcaatgagcaggtgcacaagtcgccgccactatagtttggttaacttcaaaata

SEQ ID NO: 6201 - DNA, 418 bp, Triticum aestivum
  Clone ID: LIB104-052-Q1-E1-C8
attcccgggtcgacggggctgctgcagggatacacggggtcctcaaaaagcttggacgggacatccccggcagcgacaagcacaggacggttattgccatggacggtgggctctacgagcactacacaatcttcagcgaaaccctggagaacaccctgcgcgagatgctaggggaggaagtatcctcctccgttgtcatcaagctcgcgaacgacgggtcaggtatcggggccgctctcctcgctgcagctcattctcagtacctcgaggccgaggtctgaggagccatagcctggatatagatatatgttgggttgttcctcaggagcagcgatgtctgagtcacgccagggtcctgtctgtgtgtgtagctggagcatccatggagagctgtgtctcttagtaattggtagctctg

SEQ ID NO: 6202 - DNA, 456 bp, Triticum aestivum
  Clone ID: LIB104-052-Q1-E1-D5
aatgcccgggtcgacgggacatgctgacatttttatttgaagagttctatttagttaattcttttttcagatgattaatagataaattactcacgtccagcaatttattttagaatttttggggttccagatcttgcgctagctacagattactacagactgttctgtttttgacagattctgtttctcgtgtgttgtttgcttattttgatgaatctatggctagtaaaatagtttataatccatagagaagttggaatacagtaggtttaacaccaatataaataaagaatgagttcattacagtaccttgaagtggtcttttggtttctttcgctaacggagctcacgagttttctattttgagttttgtgttgtgaagttttcaagttttgggtgaattcttttgatggatcatggaacaaggagtggcaagagcctaagcttggggatgcc

SEQ ID NO: 6203 - DNA, 406 bp, Triticum aestivum
  Clone ID: LIB104-052-Q1-E1-D6
attcccgggtcgacgggcaatggaagatgtaggtgtgatatgtcaagtagtggacagataagccaaccactggatgtggttttcagggatttttgcagtgggatttgtagggtactatgctgcgctgtgtttgggatttgaaataaaacgatgggagatgtgccacgctcttaaatgccaatcttctgctccaaacttgctaaattacttgttgcattttgcagcttgtctacctttacagtgactaccttcttttggctgtgcccaattgggaaaacagtttgtccaattcacatctacttcgtgtccttttagacatttcaaatagacaacaacatacggatgtatgtatacatattttatagtgtagatccactcattttgctccctaagttgtcacttgttg

SEQ ID NO: 6204 - DNA, 445 bp, Triticum aestivum
  Clone ID: LIB104-052-Q1-E1-D8
ccgggtcgacggggaatattaaattccaattgccattaaagaaaggcatggagcactttccaggaaagaaaatcaaattaccttatgaatctatcgtgcgagctccctatgaaccaagtgccaaagatggcactatttagatctatcttcgcttttatgcctagctaggggcgttaaacgatagcgctagttgggaggcaacccaattttctttatgttctttgtttttgttcctgtttggtaataaattttgtttctactttctgtttagatgtgttttcttcttttaattagtgtttgtgccaagtagaacctataggataacctatgatatgagttgatttgattctgcggaaaaacagaaactttgcactcacgaaaaaaattcaataaatcacaggaacgtgcttttgcattgattccttttgctgctgatcaataaaca

SEQ ID NO: 6205 - DNA, 404 bp, Triticum aestivum
  Clone ID: LIB104-052-Q1-E1-D9
cgggccgacgggtcatttcatgcatgatgaattatcttcataagttgaagaggatctccacaagtacaacctgccatgtgcatttgcattccaaaagcaaattacttatatgcacatcttcagggggagcccttgccacttatgaagacaataccctatcctttacaatttcacatacttcattcccgttgaaaacttcaaccagtttgtcatcaatcaccaaaaagggggagattgtaagtgcatctagtgccacccctagttggttttggagtattgacgacaaagttggttgagggactaatgcgtttgtgagaattgcaggataactcaggtagtgtccctcattgattcggtttacctaccggagatgacccctaaaaatgtatgaagacattgacgac

SEQ ID NO: 6206 - DNA, 439 bp, Triticum aestivum
  Clone ID: LIB104-052-Q1-E1-E7
attcccgggtcgacgggctatagaataaagagtggcaagagcctaagcttggggatgcccaaggcaccccaagatattcaagaatagccaaaagcctaagcttggggatgcccccgaaaggcatcccctctttcatcttcgttcattggtaactttacttggagctatatttttattcaccacatgatatgtgttttgcttggatcgtcgtgtattatattggtctttgcttgttagtttaccacaatcatccttgctgtaacacaccttttgggagaagcctatttgcttaggatttgatagaatactctgtgtgcttcacttataccttttgagcttgatagtttttgctctagtgcttcacttatatcttttagagcatggtggtggattaattttgaagaaattgctagtctctcatgcttcacttatattattt

SEQ ID NO: 6207 - DNA, 442 bp, Triticum aestivum
  Clone ID: LIB104-052-Q1-E1-E8
gtataggtccagaatgcccgggtcgacatgggcgacatgctgatgatggacaggttccgtcaatggcaggccacgcacaaccggtcgtacctgagcgcggaggagaggctgcgtcgcttccgggtgtaccgcgacaacgtggagtacatcgacgccaccaaccggcgcggcgacctcacctacgagctcggcgagaatgagttcgccgacctcacccaggaggagttcctagccaggtacgcgtcgtcctacgatggggtcggtgatgatactggcatcacgttgcctgtgggcggtggcgacgccgagctgtggtcgtccggcggcgacaatgatagctccttggaggctccgcctcccagctgggactggagatccaagggcgccgtcacaccggtcaagtcccaaggcgcaggatgcgctagctgctgggcgttcgtga

SEQ ID NO: 6208 - DNA, 446 bp, Triticum aestivum
  unsure at all n locations
  Clone ID: LIB104-052-Q1-E1-F5
aattcccgggtcgacggggtctcattaatggaatgccaatgaattacaaacttgtcgtcatcctgaaacattgagaatctcggtttttaaatcccagtaaatcaaaaactcaaccaaaaaacatgaaacctggcatggtttcatgacatggcacatatatgccgtggtaaaaaaaatcgtccagtttgagaagaggcgcacacattagtagccaacaaagtcctttttgaaacaaaaatctgacatgttaatatcgcaaatggttgtattatattaaccatgtcgaaatttaaccatacttggtggtgtgcgtgcagctgtttgattagacgggacgagcccgagaagtccaccgtgcaggctcgacgggacgcgtgcgaagagtctgccgtgcaggctcgacangacgcgtgcatcctgtccgcctcgcaggctcgacgggacac

SEQ ID NO: 6209 - DNA, 440 bp, Triticum aestivum
  unsure at all n locations
  Clone ID: LIB104-052-Q1-E1-F8
tcccgggtcgacgagggctacaaagagaagaagcccgatcaacacccaaagccacaactgcagaaggtcgatttaagtgaactcatgcgctttgctgctacccctgaagaagagttgcggcggcgaggtggtaatggttatcatgagtactctactgatgaagaggatgatgctgttctggctcatgtgcgtgatgaagacgatgatgatgactttctgagtgattcttctgtgagcgatgaggagaatgctcaaaccgagggagcggatgttcacaaggttgctgctattgtggccagctgaaggcatttggtccatctctatctgtcttcatctaactagtagtatatgtttacttactggcagatgtctctttgctggatccgtctgtgttaaatgtacccctgttgtgtcntgtttcgaacaccgactatataatt

SEQ ID NO: 6210 - DNA, 389 bp, Triticum aestivum
  Clone ID: LIB104-052-Q1-E1-G11
tcccgggccgaccaaagctccatagtcccactcagtcttcaccgtgccacccaactcgacatcgaggcctcattccgtattgacccgctcgacttcgccgctgcgaaggaggcggatatcggctacaactgcagcaccagcggtggcacgactggacggggcacgcttggtcccttcggcctccttgtgctcgctgatgccaggcgccacggtggtgatatggagcggaccggcgtctacttctacgtcgcgagaggcctcgacggcggcctgcgcacacacttctgtcatgacgagacacgctcatctcatgccaacgatattgtcaagagggtcgtaggcaatattgtccccgtgctcaatggcgaggagttttcgctgagggtgct

SEQ ID NO: 6211 - DNA, 443 bp, Triticum aestivum
  Clone ID: LIB104-052-Q1-E1-G4
attcacgggtcgacgacaaacttgtattttaggttgcaaaatgatatattcacttaagtgagctgatcaatcccttctgtacgtgtgacgcctctcttctgaaaaaagagccttccgtaggttggtaatgaaacagtgatgagggatccactggatcaagcgcattgagccattgactcattgtggagtcatgagtctccacgaggagtccaccctttctgtcccttttccaatattttccgtatatcttccgttcaacatcaatcttacgttgctgaacattgctcttgtatgtaacaaaccaaaagtaaataataacaatatgacccaagaattccagaaagcgccacttacgcacgagacaatgccagctgtactagttgttgtacacacatgttacatttggggatggggattgggattgagcatcgcaagatcgaacc

SEQ ID NO: 6212 - DNA, 304 bp, Triticum aestivum
  Clone ID: LIB104-052-Q1-E1-G9
cggtctagaattcccgggccgacgggcaggcaaccgtgtagcaacgaccatggtgaccaaatccttcgattttgtgatggcaggtgtgcatgcctctggctttgtcgcgtattgtgccatatttcgatagtgtatctagtgtcctgtgttcagtaaaccaacgctcgtctcgtctttgttgagtctagcatctgtgttgcttctgttcataatcgtaagcgaggctccagtgtcgtgtgcaactgcaaatagttttgtcctattttctactgctgctgctattggtccagatgaactttgtctc

SEQ ID NO: 6213 - DNA, 346 bp, Triticum aestivum
  Clone ID: LIB104-052-Q1-E1-H7
attcccgggtcgacggggaacaggtaccagaagccgtcgaggaccaggagcactcataagaaactacactacgcgtaaacagttacaagaacctacatacatgttcgttccccacgctgatgttgctcttgtgtattgctgctgctgcccatcttttttctcatcccacagaggcaaaaaaaaaaaaaaaaaaaaaaaaaaaaaaaaaaaaaaaaaaaaaaaaaaaaaaaaaaccaaaaaaaaaaaaaaaaaaaaaaaaaaaaaagcggccgccctaaaggttccaagcttacttacgcttgaatgcaacgtcatagctcttcaaaagtgtcaccaaaattcaatt

SEQ ID NO: 6214 - DNA, 446 bp, Triticum aestivum
  Clone ID: LIB104-052-Q1-E1-H9
ggtctagggattcccgggtcgacgggcatcctaggcttatgtgtgtggtgaatgaccgtcaattcggtccaatgatattgtaaaactgaatttagagtctgcaattgttacttgggggtttggtagacggtcgttgtgtttggggacgatgcagctgcagccggttctcttgttgtggtagatttgtggcatggcaggtgctgctaagctggagcctgcttgaactgttttcctgtcactttgttggggtaataatgaccatcctgtaaaaaaaaaaagaaaaaaaaaaaaaaaaaaaaaaaaaaaaaaaaaaaaaaaaaaaaaaaaaaaaaaaaaggcaaaaaaaaacaaaaaaaaaaacaaaaaaaagcggccgccctaaaggttccaaccttacttacccgtgcatgcgaggtcaaaaccccttcccaaggggccccccaaaa

SEQ ID NO: 6215 - DNA, 424 bp, Triticum aestivum
  Clone ID: LIB104-053-Q1-E1-A8
aattcccgggtcgacgggcaccatacaagacgtgttcatgccgacccagtacataccgttaaggtagttgagggtgacggggatcggatcacaatcaagggggttgatgctcgccaccctatgattgttatgctgcgtgacacgctgtttctgaagatcaggcggcatcagcaaccaaggaggtggcttaaaaagctctggcctgaaggccttcttgcactggtacacgggcgagggcatggacgagatggagttcaccgaggccgagagcaacatgaacgacctggtggctgagtaccagcagtaccaggatgcgacggtcgaggaggaagaggactatgaggatgagcaggaggatgaggaggccgcctaagcgggcttccccctttcttcccagggatatgccttatatcgctcgttatgt

SEQ ID NO: 6216 - DNA, 403 bp, Triticum aestivum
  Clone ID: LIB104-053-Q1-E1-B8
ggtataggtcaggaattcccgggccgacgggcagagcaaaatcgaatgaaccagacgccattcctaaacgaacgacggcgaggacgagcagaatcgaatcgaatgaaccagacgcgatttctgaacgaacgacagcgaggacgagcagaatcgaaagaaccagacgcgatttctgaacgaacgatggcgaggacgagcagaaccaaataaaccaagaaccccacggacgagcgaaaccaaatctgattcttctaatccgacggacgaatcgagcggggatgagcgagatagaaccaggcgcaggaggaggcgaggcaggaaccgaggacgagccgaggcgagagggcatggcccgggcgaatacaggaggagtggcccggagccccggatgaagagaggggga

SEQ ID NO: 6217 - DNA, 414 bp, Triticum aestivum
  Clone ID: LIB104-053-Q1-E1-C12
gtagccgtctagaattcacgggtcgacgggcggattgatccccaagtcgttgcatccttcatgtggatattcttctagtattacaaagccccccatgtagatagcttcgtcggcttgtcgaacactcgaacaccacctaaattcctactattagaggaaaaatggtactgcagatactgattaatgaaccgatctcttggttggaaagggaaataaagatgttggcctgaccggtctcttggtcgaaaaaggacagaaagtggggggtgttgggtcaacaatccaaccaagaatgagcacgtctagatttcttatggttacataggaaatttcgctgacgagaacaaaaaatgcataaatccaaacatgctttgcatgtctgccgcactcggcaacacctctgcctcaccattt

SEQ ID NO: 6218 - DNA, 416 bp, Triticum aestivum
  Clone ID: LIB104-053-Q1-E1-C6
gtataggtctagaattcccgggccgacggggacgggacgtgatggaccgctaaacctagacaaatattgaggaaaatggagcttgggggtcgagcttggagaggagaaagcttacctagtgtggctcgggcatttcatcgaacacctcatgtgtataggaggtgagctagagcaccacaaagccctcccctcgtcgtccagaaaaaatagagcaatgtggagtcctctgctggccggcgagcgggtatatataggcatctcattggtcccggttcgtggctggaaccgggactaaaggacaccctttggtcccggttcaagccaccagccgggaccaatggtggtgggccaggagcgaggcacattggtcccggttcgagcctcgaaccgggaacaaagggtacagatgaaccggg

SEQ ID NO: 6219 - DNA, 185 bp, Triticum aestivum
  Clone ID: LIB104-053-Q1-E1-D1
gtaagtaactatcagaggttgagtgtcgtgaaaacgttctgagaaatgtgggatttgctttgtaatggtaagccacatacaagaagtggctgaaggaaaaaaccggccgcatctacgaggatccaaacttacttacacggtaatgtcacgtcataccactaccatagtgtaaccaaaaatcaatt

SEQ ID NO: 6220 - DNA, 432 bp, Triticum aestivum
  Clone ID: LIB104-053-Q1-E1-D6
gtataggtctagaattcccgggccgacgggtttggcaacctgctgctggagctgatcaccggccagacagcgctggagttcggaaaggcatcaaatcagaagggagccatgctggattgggtgaagaagatgcaccatgagaagaaacttgatgtactggttgacaagggtctgcggagcagctacgaccggatcgagctcgaggacatggtgcaggtggcgctcctttgcacacagtacctcccaggccaccgaccgaggatgtcggaggtggttcgcatgctggaaggcgacgggcttgcggaacggtggcaagcgtcgcaacgagccgactcacacaagttcaccgtgcctgagttcaccttcagccgctgctactccgacctgaccgacgactcgtcattgctggtgcatgccgtctagctctccggg

SEQ ID NO: 6221 - DNA, 433 bp, Triticum aestivum
  Clone ID: LIB104-053-Q1-E1-D8
aattcccgggccgacgggtggcctactttcagaattttataaacagccgcacataaggtaatattttaaatcaacaaagtgccatatagcgcaaacaaattcgttttcatactacaaatacgacatgagtacatttactcaaagattgtgtccttggtacattcgtcagccatgagacgagcgcctttcataatgccatcataatatttctcggggtagcggtgcaccttgccctctgggggtccatccttcaccagcttctctgcatctagcttggcccaatgcatttatgcacgggcaaaggctcggcgggcaccctcaatacaaatggatcgcttgataacttcaagccacgaataggcatttaccatccgctttataaggccggagtagctatcgggcaagggctcaccaggccacatctggactatga

SEQ ID NO: 6222 - DNA, 393 bp, Triticum aestivum
  Clone ID: LIB104-053-Q1-E1-E5
aattcccgggccgacgggcaacagagttccaagcaacagtcggtattgcagatggcttggcaccaacactgttcaattcagctccccaggttgcgttgttctcttcccgggggcctgatgtaaaagattttagcttccaagatgctgatgttctcaaacctgatatactcgctcctggcaatctcatatggtccgcatgggcacctaatggaacagatgaagcaaactacgctggggaaggatttgcaatgatgtctggaactagcatggctgcaccacatattgctggcattgcagcactaataaaacagaagtatcccaagtggagcccgtcagcaataaagtccgccttgatgactactgccaatacgatcgacaaagggagccatcctc

SEQ ID NO: 6223 - DNA, 428 bp, Triticum aestivum
  Clone ID: LIB104-053-Q1-E1-E6
aattcccgggccgacggggtctgtacgatcttctacagaatatagtcctcatcagagatcccgaggactccacaaagtactatccctgctttaacctggaagatacttcaagttttagggacttggatgaacatagcaaaaatgtccttagaagattacaccatgactattatttcgttcgccaagaaaatctttggcgacaaaatgcactgaagactctacctgttctattgaactgttcggatatgttggcatgcggggaagatcttggccttatccctgcttgtgttcaccctgttatgctagaactcgggttgattggattgcgtatccagagaatgcctagtgaaccaggcttggaatttgatattccgtccaagtacagctatatgacggtttgtgctccctcatgtcatgattgctccaca

SEQ ID NO: 6224 - DNA, 418 bp, Triticum aestivum
  Clone ID: LIB104-053-Q1-E1-E7
ggtacaggtcaggaattcccgggccgacggggtcaggaagaagtggggcggtggcgtcatgggctccaagtcgcaggccaagaccaaggccagggaaaggctcatcgccaaggaggctgcgcagaggatgaactaagcctagccctataagtattgtcagagcatatgccatgtagtttccctttcagtctgtcctgattttgacgaggaactcgaacccttttagcagcactgtggaatcgtattgtggttttctgattcgctgttccgttctccagacttctgcaaagatcagatgaggtttacccatgtttggattctatatagttttatgtcctttgtcgagtctgaagttagttgtgtttgacatcttccaaacttggctggcttttggttaacatgcaatgacgaacagctc

SEQ ID NO: 6225 - DNA, 419 bp, Triticum aestivum
  unsure at all n locations
  Clone ID: LIB104-053-Q1-E1-E8
gtaaaggtcaggaattcncgggccgacggggacacaacgtgggaaaatcctcattcctctgaagtatctgatgtaagggaggtgaccacagaagctgaagaaaacagcttggatattcctgttgatagccagccagttgctgacgatactttccaaggctagactggacttttgccattcttgtacaccatgactttttgtactaaagtttttcatctcggttcacagcgaacattcttataatcttattcagttttcgcattgacccagagttccgtcacagcttttgttgctcatctgtaaacctgagtgaaacaaaaagaagaattggatcatcaaaaaaaaaaaaaaataaaaaaaaaaaaaaactagaaaaaaaataaccggttcaaagaaaacctcaaaaagagtttgatgtc

SEQ ID NO: 6226 - DNA, 442 bp, Triticum aestivum
  unsure at all n locations
  Clone ID: LIB104-053-Q1-E1-F5
ggtataggtccagaattcccgggccgacaaccggatcatcaacactgactccggcatagaaaacttgcaagagaatggtacaccatgacgatgtacactgaattgaagatccccagaaagtggaaatccgcccgcttccaactgatgataaaattcttgcaattgagtatcaaattggtggtagtaagctccaagaagaagaggtgcattgtgctcatcagcctgagaaaagtgtaacatccaaccacaatctataaaataggcatacaaattcgaaggagcgaaagatgaagatgcaacaatacttgagagctcaaggtatcctctctgtgattatatttttttcatcatttcacacatcgatgttttgcgtcttgagatgtttattggattgtgcaagaacaagggtttcaatatatgcaaaanaaaacgacaacagtac

SEQ ID NO: 6227 - DNA, 412 bp, Triticum aestivum
  Clone ID: LIB104-053-Q1-E1-F7
gtacaggtcaggaattcccgggccgacgggggcgataaagatcatcttcaggcacaaggcgccggtggctgttgctgcggcaatcggctgctgttgatttcattcacgcacgctaatcgcggacatcgatctatgatctatctttatctttgtggaggatggatgataactgtttgttgtttgacaaggtgacatctaagcagctcgtttgtgtcattttcttttgcttgtgttgctgtatatgatatgtatcactgggtcagttgatgctcctcatgttgaatcatcacagaatacctgactgcggacgaacggacacacggtcgctctaaaggatcgacgtttaactagccgttcatgctacttcagaactcttcaaaagtgtcacccaacttcacttcattgaacgtca

SEQ ID NO: 6228 - DNA, 292 bp, Triticum aestivum
  Clone ID: LIB104-053-Q1-E1-F9
attcacgggtcgacggggatcgcaatgacgacggctcttgctagcagttccacatcaaaccatcaaatgtgcctgagctttagcgctcacttcagtgacatgtttatggaggaccgctttcctacattgtcatcctggtaaagggatggcaaacatcgtcttcatagccgtgaagctcaatatgaagcactgctactctaactcgaagtacaaggattactgcactgatgacaacgtcggccaatatgatgatgtcgctcacgcgcctgagtttgacatctatcgtgagatg

SEQ ID NO: 6229 - DNA, 425 bp, Triticum aestivum
  Clone ID: LIB104-053-Q1-E1-G5
aattcccgggccgacgggtacacaacctgcacacccgtataaccttgtaagtatctgtcctccggtacaacatcaaggtcgattcctcttatttgatcaaccattcgccgtgtcaaaaatgcagagggggatgcaaggagcacaaggcctgcacatccaagcaagtggtaacatggacttgtacatggaacatcccaagcgcaatcagagctgcagtgagcctgtacaacgagctagcgtaagtccctgcatttcatttaattcgtactggcattcgtgtatgatttgtgtgcagtggctgatccacgaatttaagttaccaggggcgaacatttaacttaaaaaatacgaaggcacttgcactctggaaatcaacataacttgagaaatgtgaagctacatgcactttggaaactagctaatga

SEQ ID NO: 6230 - DNA, 370 bp, Triticum aestivum
  Clone ID: LIB104-053-Q1-E1-G9
aattcacgggtcgacggggaccacaaggagaagaaggacaagaagaagaagaaggacaagaagcacggcgagggccacaaggacgacgacggccacggcagcagcagcagcgacagcgacagcgactgagccagctccggccgcgctccggcagcagcgtgcagtgtaggcgagatcgatgaacgcttgggagaagtgtggcatacatatatgttgcagggtttggagcgtgtggtagcatatgtatgtaatgcgtgacatgtctcatggatcttgtgatgtataataattagccggctgcactgcactgcacggtgcttgtaataataacgttaatgaatcatgttggtattgatgcatctccgttggt

SEQ ID NO: 6231 - DNA, 264 bp, Triticum aestivum
  Clone ID: LIB104-054-Q1-E1-A2
cggtccggaaatcacgggtcgaccggatgagatggaataaccagatcgtggaccaacaagaacggccgcccctccgggaaaaaccccccccttgtggtaaaaacatacgggaaatccgggaacaaaaaacattaggaaccccccgaaataaacatgaaaaattgaaaaaattgacagatactgggcaagatgtcaaacacatctggcttcctctcaaaaaaaaagataaaaaaaaaaaaaaaaagcggccgctcaaaaggatcc

SEQ ID NO: 6232 - DNA, 85 bp, Triticum aestivum
  Clone ID: LIB104-054-Q1-E1-B2
tccggaaattcagggtcgaccgggccagtggctgaattgttcaaggattcaagagtcagtccagcgtgaatacctcggacgtcga

SEQ ID NO: 6233 - DNA, 385 bp, Triticum aestivum
  Clone ID: LIB104-054-Q1-E1-B4
agggtcgacccggctcagatcagaagaccctgtaggttgttcttgtacatgcattcgccgtgtcagcagccaggcgacgcggaggggatgaagggcagagagagaacatgtttctgtctaggtcatcctgcttacttaggggaggtggagggcccgacagaacgcatgcaaatattgaagagggccgagactaatttgttaacggttatttttaaggtttattgtctgtttatttctacttgatttcaactttctatacatacatacatgcaaaatgcgcaaagtacacttcttacacacgcctcttccgtggccacctctcacaacccacatacgcagctcttttccgatagaaaaaaacgggcggctctagaggattcaagct

SEQ ID NO: 6234 - DNA, 480 bp, Triticum aestivum
  Clone ID: LIB104-054-Q1-E1-B5
cgggtcgaccgggaaggcgaagatgtcgtggcagacttacgtggacgagcacctgatgtgcgacatcgagggccaccacctcgcctccgccgccatcctcggccacgacggcaccgtctgggcccagagcgccgatttcccgtcgttcaagccggcggagatggccaacatcatgaaggacttcgacgagccggggaccctcgccccgaccgggctgctactcgcagacgccaagtacatggtcatccaaggtgaacctggcgccgtcatccgcggcaagaagggcgcgggaggcatcaccctgaagaagaccgggcaggcgctggtggtcggcatctacgacgagcccgtgaccccggggcagtgcaacctggtggtggagaggctgggcgactacctggtagagcagggcatgtagacgacgacgacgaccacgccacgccgccgcagcaccaacaatactaccggccaaaagacaca

SEQ ID NO: 6235 - DNA, 455 bp, Triticum aestivum
  Clone ID: LIB104-054-Q1-E1-C2
tccggaattcacgggtcgaccgggtgacgctccaacacatgtccattaacgatgtgtgggtcaatgaacccaacatcatggatgttccttactctgcattcctcaatcttcattctgcatgtataatagcggacacaacaatatagttaggacatatatatagtgcaggcaatatgaacgagatggggtagaaattaataaatcacttacagaacgtagcaactgatgatagatttatcgagctcgcgcagattgaaaagctggaacaattcactcagttcaatttgtacatagtaatgtttgaagtgatgctcatgtctaacttccgcataaatatattctttggcgtttttattttttatgtaacccttgtaccatttcagcagacctttcatttgtggaggtagatccttttcctgcgcaggctcgacgagaggcccattcttgacatatgt

SEQ ID NO: 6236 - DNA, 433 bp, Triticum aestivum
  Clone ID: LIB104-054-Q1-E1-C4
gggtcgaccggcagctgagagtcactgtcatggcgcgtcacctggtggatcgatctgtcaggcgggcttctggagtactcgcagctaagacatcctccagaagctatgctaaacttgaagttttctcttgtaagatggaagtcactgtcgcctggtctcttctcccgtactggccacatttacgtgacatgccgtgtcctagcatatgaatgtggctttggtttggctctaggtgccggaagtagttatttatctatgcatgtatgtatggttcgtaacaagtgttaagtggggggactgtaacttaagctgggtgggtggtaataagccatatccttctatttgtcagaattactatgtaatatagacagttcagattcgatggttgttccaataaaaaaaaaaagaaaaaaaaaaaaaaaaaaagcggccg

SEQ ID NO: 6237 - DNA, 487 bp, Triticum aestivum
  Clone ID: LIB104-054-Q1-E1-C9
tccggaaatccagggtcgaccggatccagacaacagaatgtaaaaaaaagttacctcattttgcaatctattatgaattgattcaaccagcaggtttttgtcaaatcccagactgataactttaacaagagattcttcatcaatctacaaaatcatgagagaaaccaacaccttatttgaggacttaaatgaagaaatacatgactaaaaaatcctgtcagctcccatctggacagtcacacagaaaactgcaagattgactccaatacacataaaattttaagaaaccagtgagcactcccatgcatagcctcactaaatggcacaaggcagaagggtaatgtacagaccccagaaaaaaactttaaaatatatcattataaatcatgaagagaaatgatgggcacatttttaaccacatataaacttaaccaccaagtttatatgccttaataggagatatcaacaatataaaatatttttatgg

SEQ ID NO: 6238 - DNA, 485 bp, Triticum aestivum
  Clone ID: LIB104-054-Q1-E1-D1
tccggaaatcacgggtcgacgggactcactaccactagggagcatcatggaattggtgatgaaggagggctgatgatgacgatgatcgaagattcccctctccggacccccaaaccggctccacatctggcctcccgatgaagaacaggaggtggcggtggcttcgtatcgtgaaacatgatcaaacttcctctttaatttttctctccaaaagacaggtttttatagagttggaattagggttagtgaagccttgtgggacccactacccaccagggcctgctagagggggatggcgcgccctcatgcctggcgggcagccctccggtaggtcttggttccataaatcatcatttattccaacataattccccaaaaatttccttccaattccgagaacttttatttctgcacaaaacaacaccatgatagttctgctgaaaacatcgtcagtccgggttaggttcattcaagtcatgcaaact

SEQ ID NO: 6239 - DNA, 271 bp, Triticum aestivum
  unsure at all n locations
  Clone ID: LIB104-054-Q1-E1-D4
tccggaaatccagggtcgacgggtacataagggacactttccagaacgtttcagactccgaaaaaggaataggtacttggaacggtaagtaaaccgactcaaaaacatttctaagggcaattttcctccgttttgaaatatttacaaaaataggaaaataagaagcagtccgggaaagacacgaagcntccacgaaggtgggaagtgccgcctaccccctgggcgcgccccctgcctcgtgggcaactcgtgtgctcccgggactccgttt

SEQ ID NO: 6240 - DNA, 271 bp, Triticum aestivum
  unsure at all n locations
  Clone ID: LIB104-054-Q1-E1-D8
acggtcaggaattccgggtcgaccgggtgcgcgttctgagcgcggctgctgcggacggttgggctcaaggtcggcgggaacccgaacgtgtacgccagcctccttggggttctgtggtcctccgtggcaaacaggtggcacctggagatgccaggcatcgtagatggctcgatttcgatcatgtcaaggaccggccttgggatcggaatgtttaacactggcctgttcatangtctacaggacaagctcgtcgtgtgccggcctggactga

SEQ ID NO: 6241 - DNA, 468 bp, Triticum aestivum
  Clone ID: LIB104-054-Q1-E1-E3
gtcggccggagcatcttctgggatggaagcggttgcggagggcaaggcccagtaaccctgaaagaagaaagacggccctgcccctgatgtttggaaggaaaggggcgtgtgttagctgatgtaatgttacaccgtagaatcatcgttcgtgacgataataatgatccgaccagaactcctctagtatcattgttctgttgtcattgtgtagtttactctgtatctgaactttgttttactcagcgaaaccgtactgctatgatgaatgtgtcgatgtaaatcgtggctgtcgtgcctgtctgactgatacattgttcatgtagtcgatgaatgatagcacctgtgtcgtctcagtttcaaaacaaaaactcaaatcaaacaaaaaaactattatcaatagccgaaaccaaccacaattaaattatccaagacacaaaaaaaagcggcccctcaaaaggatccaacctt

SEQ ID NO: 6242 - DNA, 464 bp, Triticum aestivum
  Clone ID: LIB104-054-Q1-E1-F1
tccggaaatccagggtcgaccggagcaaaggcgccgacgacaagaagctggcggggatggcggcactcaccaccgccaccctccttcttcaagcatccggggacgcgagcccgggcgttcagaagcagcgctacccagacctgaccaaggccgacgaggaatgctttgaaacctgctacaaggagctgaccaatggcggccaaaaactcgacaatttgtgcaccagcaaagagggctcggacgacatcggcatggcccagctccccgaaatccgcagcttcatcaaggagaacaacggggcgcatgcccagtggaattgcgataggtgtcgccctgcgaatgacaagaagacacccgacgatgtctccaagaagaacgatgccgaaaaggccatggctgtcctcgaggtgctcgtcaacaaagtgaccaaattatgaaaaacaaacaaaacctcattgcatact

SEQ ID NO: 6243 - DNA, 445 bp, Triticum aestivum
  unsure at all n locations
  Clone ID: LIB104-054-Q1-E1-F11
gtccggaaatccaaggtcgaccggcgcgtttcgaaagatgaggctttattacgagacanagaggaagaaaatgcgatgctgaagcaacaattggaacagtatgagaataaatggtcagaatatgagaccaagatgaaagttatggaagaggcatggaagaaacagctctcttctctgcagttgagtcttgtggctgctaagaagagcctagctgctgatgacatggtcacccgagcagctcggactgataccactccaacgcatgctcaatacgactctgaagatacaatgtccacagggacccataccccagaagggacagagttgaaataccaaaaccacaaccctgaacctagactggcgacaggaaactcagataggcggatagatgctgtgaatcacctagcaaaggagtttgaggacaggcgacaggtattcgacgacg

SEQ ID NO: 6244 - DNA, 358 bp, Triticum aestivum
  Clone ID: LIB104-054-Q1-E1-F2
gtccggatatcacgggtcgaccggactccagacactgagctactatacaaaggctggcaggaaaacacttgctgacaattatgactatgtcatgcatggaaagctttacaagatttcagaggacaattccagcaaggataaaggacctactaaagtggagatctatgcatcttttggcggcctcctgatgttgctcaaaggtgatccttcaagtgctgctaacctcgagctggatcaaaagctgttcctcctcatccgaaaggtgtaaacgtgtcatctacctgataaccagcgcttgtagttcactcaaggctattacaagcctgtgatcgtttggaggctaatcgtcctacaccct

SEQ ID NO: 6245 - DNA, 435 bp, Triticum aestivum
  Clone ID: LIB104-054-Q1-E1-F3
ggggagagagagattggtaactttgtgcatgagagagagacagagggtgggggaggagtcagtcagccgtcgtcacatcaccctgcttccaaatgaccccgcattctctagcgcagtgtggttgccgtcatcgatctgctcgatgccctctttgacgattgaggtgttgtgcatgttggggtgcaaagaagcacaagcgagagtggtcaccgtataaccttggatggggatgaattgtgtgctcgggtgtgtgtgtgtgtgtgtgtgttgtgctccatgtgtgtgtgtgtgtgtgtgtgcatgtgtgtgtgtgtgtgtcagatattgagagaaaaaacctaaggagagaaatgggtattcacgaagagattgtgcgggccttgaggtgggcagggcccgggtgacggtgtcaaaatgtgcgcgttgatgcatgtg

SEQ ID NO: 6246 - DNA, 420 bp, Triticum aestivum
  unsure at all n locations
  Clone ID: LIB104-055-Q1-E1-A1
gtacggtccagaattcncgggtcgacatccatacagaactgaaggacgggaaataggatgggacagagagagaggagagagagggagggagaggggtagagtgctggatgggtgatggagttgcttctcgaagagtggggatgtgtttctgtgtgtgcctgtgcgtgatagagctgtcgggacgcatccatggatgatgaaggggaaccatgtgtttggtaagcaaacctaactagatcggtagatcaattgttgtttgtcggaggaagggagagacataactaatgaggtagatcgatcgacgcgtggggaaaaacgagttataaggacctagctagctatatgtatagcgggagatcggtcggtgtacgtccatttgttagaggcaaataaggcccggcgagacggatagacagagag

SEQ ID NO: 6247 - DNA, 423 bp, Triticum aestivum
  Clone ID: LIB104-055-Q1-E1-A2
cggtccagaaatcccgggtcgacttccatcaaaacgatattcatcatctcatcgaaagacgggacacctttgcctctatcaagtggtatcagatttccaggttgctcggtgagattttacagtttttcgtagtttagatcgagtctgttcttcatacctacagtccacgaaaaagccacaaaaaaaaattagggttagttcatcatatccgaaccaatctgagcctttgcataatctttttagggtttttgctttgttgaatttgcggttgcatcgtcgtgtcaagttgctggtcttagagtctagtcttttagagtttcgagttctggtcataagttgtcacgccgccgccgcaccatcatcatcgccttgccatctaccaccattgcttatccgccaacgctttgaatccgtatccatata

SEQ ID NO: 6248 - DNA, 433 bp, Triticum aestivum
  Clone ID: LIB104-055-Q1-E1-A6
gtaccgatctacaattcccgggccgacgggatggacaagggggcgtggagcgaggagagcaggaaaggctacaatctcgtggatgcagtcacgaggtgcacggtgcaggtgtatccgagagggtggacggcgatcttcatcgcgctggacaacgtggggatgtggaacgtgaggtcggaggattgggtgcgcaggtacctgggccagcagttctacctccgggtgtacacgccggcgcactccgtccgcgacgagctcaccgtgccgaccaacgcgatcctctgcggccgcgctgccaacaagagccgcctgccattctctcagtagtgagcactgagcagccgctggcagggaatgatccaattgtatcggagtattagtagtggtatatggtgtgcaagtcgaactgtcgaagacttagtttggctggtta

SEQ ID NO: 6249 - DNA, 483 bp, Triticum aestivum
  unsure at all n locations
  Clone ID: LIB104-055-Q1-E1-B10
ccggtcaagaatnccgggtcgaccggcaccttgacaactatcttctggctgctcgccatgctctgcaccggcaacttcggtgcgtacctgctcgtcgcacggtggtatacctacaagaagaccgctgactaaacctggcgatcactgtgccgtatgtgctagggtacttctttgatgcaataaacgtgtaattgggaaagctacctgtgttgcggcaaatcttgaaggaactctgctcatagaagattcagaatcgttgatctagaaaaagttcgtcagcagtctggaaaattcaggtttcagcaccgactcctgttggacgcccgcaggagtcgggtaggcgcggcagtaatgcctaaaagcaagggaaactggccggccaactctggcgcgagcatgctttttactctttattaatcttttaatcggtttttctctgattttttttgcgaatcttgatgttttaaaccctttttaaaaatc

SEQ ID NO: 6250 - DNA, 361 bp, Triticum aestivum
  Clone ID: LIB104-055-Q1-E1-B6
gtaccgatctagaattgccgggccgacgggtgaagaaatgccaagacatcatcttgttgcaaataccccaccccactctctgcgagattcgctaagttcgttgtgcattacatactggaatgcgttagttacctagttacgatcgcactagaacaacatttgtgtactgagtattcggacaaagtttgtttttaaagtgggcaacttttttgttaaaaaaaaaaaaaaaaaaaaaaaaaaaaaaaaaaaaaaaaaaaaaaaaaaaaaaaaaaaaaaaaaaaaaaaaaaaaaaaaaaaacaaaaaaaaaaaaaaaaaaaaaaaaaataaaaaaaacaacaaaaaaaaaaaccaaaaaacaca

SEQ ID NO: 6251 - DNA, 458 bp, Triticum aestivum
  Clone ID: LIB104-055-Q1-E1-B8
gtaccgatctagaattcccgggccgacggggatgcgaaggttccggcagagaaagccgctgccgctgctcctccagctgtgacctacgcggcgaaggtggcccaaacagcagcggccgagaagaagcctgtggccaccgagaaaaagcctgtcgtcgccaacggtgctgtcaagaccggtgtagctgcttgatcgcatacctgatcctcccagctagccatgaggaacaaacggacggtgctggcgaaccaggcgagacatgcagggtcccaagtaccgatcaccaaaggtggctggaaagcgggttggatagttaggtttattccctagctctctttttcccctgtcatcgtcgtaataaccgtaattcaatttggctagctctaaagactctcctatagtggtatcatcggaatcaccagaaaaagagaaaagagaacctgtggcaagacaaaggt

SEQ ID NO: 6252 - DNA, 470 bp, Triticum aestivum
  Clone ID: LIB104-055-Q1-E1-B9
cgggtcgaccagattgtcaatctgaggaccgtatttgtacacaatatgttcccctttgagaggttcatgggagtcctaaggaaatatgtctgtaaccgtgctagcccagaaggaagcatctgcatgggacaccaaacagaggatgtcattgggttttgtgttgacttcattcctggccttaagaagataggtctccctaaatcgcggtatgatgggagactgattggaaaaggcacgctaggagcggactcaataatatgcagggacgggcattcttggtctcaagcacactacacagttctacagaactctaccttggtgaccccgtatgtcgatgaacacaagaatagtctgcactccaaacacccggagcagtgtgacgactggattacatgtgaacacatcaggactttcagcagttggttggaaacacgtctcagaggtgacaacactgtttgtgatgagctgta

SEQ ID NO: 6253 - DNA, 408 bp, Triticum aestivum
  Clone ID: LIB104-055-Q1-E1-C7
gtaccagtctagaattcccgggccgacaagtggctgaggtgatccgtatgatgattgtgatatcaagattaggagggtgaatgttagagctaatcttgatatttgtattagcatgtttgagttttgcatgtagtctagtctagtgtggtgttcgtccgacgaaggcttcaggtgagcgcgccaaggaggtgagatgccaggatgccgtgtgaggcggtgagcacggcgagatgccgatggtgctgcgtgagaagcggcaagacatatcagaggctggagccgtgatggactgcatcaaattgggtcgggtgaaccggccggtcgttctgtttgttggactagctgttcatgcgtgagttcgtttagtcctagccgagagtatcgttgctagtagttgatgcatgcatg

SEQ ID NO: 6254 - DNA, 490 bp, Triticum aestivum
  Clone ID: LIB104-055-Q1-E1-C9
accggtcaggcattaccgggtcgaccgggggccaagcaagcacaaaggccaaagcaaagcggtggataagtaccactctctcctgagccctaatgcaatttcatcagggcgggcatataaaatctaggggcctgtttgttcttggcctccccatacctctcgttccatggggatctgtggttggattggataaaagatgtcgtgtgtgtgtgtgtcttcaggtcccttgggttcccaccccaccctctttttactggggcgaggccacgcccggtgctgttgaaaactcacgcggcggcacatacccacagataaagatgcaagaatttaatcgtggagttgccattggacaagatggccagcctcctcctaccgtccagtgcctctccatctcactctctttcaacctgtcatgcactagtagcactgctgcctagacgtagtagctggatgctgcccagagtggctgaaagaaggctgctttcggcac

SEQ ID NO: 6255 - DNA, 418 bp, Triticum aestivum
  unsure at all n locations
  Clone ID: LIB104-055-Q1-E1-D1
cgggtcgaccgggcttcacttatatcttttgagcttgatagtttttgctctagtgcttcacttatatcttttagagcacggtggtgtcttaattttgaagaaatttctagtctctcatgcttcacttatattattttgagagtcttttagaacagcatggtattttctattttcataaagttggtcctagaatgatgagcatccaagttgggtataataaaaactatcataggaagtgaattggatgctatgatcaacttgatacttgataattgttttgagatatggaggtagtgatattaaagtcatgctagttgggtgattatgaattcaaagaatgcttgtgttgaagttagcaagtcncttagcatgcacgtatggttaaagttgtgtaacaaatttgaagcatgaagtgtac

SEQ ID NO: 6256 - DNA, 484 bp, Triticum aestivum
  unsure at all n locations
  Clone ID: LIB104-055-Q1-E1-D11
cggtcaggaatgtccgggtcgaccgggcgctctgctacagctgccagtcgtgcaaggccggcgtggtggccaccctcaagcgcaattggaagcgctccgccatcatcaacatcgtcttcctcgtcttcatcatcattgtctactccgtcggctgctgcgccttcaggaacaaccgccgcgaccaccgcaacggcggcgggtacaagcagcagggcgcgtacgcctgatcgtttggctcggttatttattgcttggattggatggatgcgatcgtcgtgtcattttcattcatcgtcgtgcttctcttaggatggcctgatctagctttgtacaggcgagattattctgtgctctgatcatctactagttaggttctatactccgtggtcatgangagggttgtgtatatatcttttctgttctttgatatgtatggcagaccattatatatgtaacggattattctggagttatttatttcata

SEQ ID NO: 6257 - DNA, 440 bp, Triticum aestivum
  Clone ID: LIB104-055-Q1-E1-D5
gtaccgagtctacaattcccgggtcgacgggccatagaaaacttggaatacagtaggtctaacaccaatataaataaagaatgagtttattacagtaccttatgtggtggtttttatttctttcactaacggagcttatgagatttcctgttgagttttgtgttgtgaagttttcaagttttgggtaaagatttgatggactatggaacaaggagtggcaaaagcctaagcttggggatgcccatggcaccccaagatattcaataatagccaaaagcctaagcttggcgatgcccggggaaggcatcccctctttcgtctttgttcattggtaactttacttggagctatatttttattcgccacatgatatgtgttttgcttggagcgtcttgtatgatattagtctttgctttttagtttaccacaatcatccttgc

SEQ ID NO: 6258 - DNA, 456 bp, Triticum aestivum
  Clone ID: LIB104-055-Q1-E1-D8
ggtaccgagtctagaattcccgggccgacggggacgaatctgaaaagccaggcaattcaaggcctcccaaaacaatgttgggcgccatgcatgcaatgtggaacaaggaaggcatcccagggttcttcaaagggttacatgctcagatactaaagacagttctgagctccgcattactgctgatgataaaagagaagatttcaaagttcacttggatctcgctgcttgccctgcggcgatatctctttgtttctcggaagagaatcaagagtgcatagttgtatcatgcatatgtcagacctgagaaaaccagtctaatcgtccactggtatttcaagatcgtattataccaaataacagaagtacagaagcagaacagcacgatcatcttgagagcgccatggaatgttctgaataaatttgtttgtttttccatgtagtagctctgaacatctg

SEQ ID NO: 6259 - DNA, 416 bp, Triticum aestivum
  Clone ID: LIB104-055-Q1-E1-E2
ggtcaagaaatcccgggtcgacggggagaaggacattggagatggaacggtcagctatggaatggatgatgctgatgacatatacatgcggtcatggactggcaccattattggccctcacaatactgtccatgagggtcgcatctaccagctgaagctgttctgtgacaaggactaccctgagaaggcaccatctgttagattccattcaagaatcaacatggcttgtgttaatcacgagactggggcggttgacccaaagaagttcagtttgctagcaaactggcagcgggagtacactatggaacatgtcttgacccagctgaagaaagatatggcggcgacgcagaaccgcaagctagtgcagcctccagaagggacattcttctagcggggtgtttgctggcccatctcca

SEQ ID NO: 6260 - DNA, 429 bp, Triticum aestivum
  Clone ID: LIB104-055-Q1-E1-E5
ggtaccgagtccggaattcccgggtcgacgggtcgagtagcagctttgagccggttcataagccggttgggtgagaaggctatgccgttgtatcaaatgatgaaaaagacggatgactttgtctggagtgacgctgccaactcctcctttgaagatttgaaaagacagcttgctgagccacagtttcttgctgcccccgttgagaaggagccgctattgttatatgtggctgctaactcacgggccatcagtgtggccattgttgtggagtgcaaggaggctggcaaggaacatccggttcaacgaccggtttactacgtcaatgaggtgctcattgaatccaagcaaagatatccacattggcagaagcttgtttatggggtgttcatggcaagccggaagcttaagcattacttccagggtcatcct

SEQ ID NO: 6261 - DNA, 434 bp, Triticum aestivum
  Clone ID: LIB104-055-Q1-E1-E6
ggtaccgatctagaattcccgggtcgacgggatgtataacattccaaattgaaaatttgggatgttacagtacatggaatatgctggcaagatcacactatagagcaatgatgaataatagctatcactacatgcatatttggccggtggaggctctaagtttaatgtttgcataaagccgattttccctacaacaaaggaataacttttatttgctaccaagttgaattacccatattgagaaggtttctccaactcaatcccaaattaccaagtataaaatactaacccaacaatttcattagacagaatgatgagattaacatataatccaaataccagatactcaagatgtccataactggggacacggctaaccatgattagtttgtacactctacagaggttgcgcactttttccccacaagactcga

SEQ ID NO: 6262 - DNA, 419 bp, Triticum aestivum
  Clone ID: LIB104-055-Q1-E1-E7
ggtaccgatctacaattcccgggccgacgggaagcagcaaccaacttaccaaaagttgattataaagcatgctaatctgaaaaaacttagtctatggggctgttctgcaatagatgccctatatgtaaattgtccagagctgagtgatctgaacctcaactcttgcataaatctgaatccagaacggttgcttcttcagtgtccaagcttgaaagatgttcatgtcactggatgccgtgacatgttgatcggagcaatcagaaaccaggttctgaatgagtttgcagcaggagagcctcgcatgccttgcaagcgccttgctgatggctcgaagcgggtgcaagtccctcagttcatgccagaacagcagtttgaggacgagaaatggtgcggcgagtcgcggcgaagccagtgcgccg

SEQ ID NO: 6263 - DNA, 466 bp, Triticum aestivum
  Clone ID: LIB104-055-Q1-E1-F10
cgggtcgaccgggtctgttcaatcatctacagaatctagtcctcatcagagatcctgaggactccacaaagtactatccccgttttaacctggaggatacttcaagttttagggacttagatgaacatagcacaaatgtccttagaagattataccatgactattatttcgttcgccaagaaaatctttggcgacaaaatgcactgaagactctacctgttctattggactgttcggatatgttggcatgcggggaagatcttggccttatccctgcttgtgttcaccctgttatgctagaactcgcgttgattggattgcgtatccagagaatgcctagtgaaccaggcttggaatttgatattccgtccaagtacagctatatgacggtttgtgctccctcatgtcatgattgctcgacattacgtgcttggtgggaaggagatgaagggacaagatgtcgttt

SEQ ID NO: 6264 - DNA, 416 bp, Triticum aestivum
  unsure at all n locations
  Clone ID: LIB104-055-Q1-E1-F3
ggtccagnaatcccgggtcgacactcttccaaacccactttcaataatattgcaaacactattatcaatctcatatttatcatgggccttaaataaatttcaagttcataagaaaaatcaccccaatcacgatcatcacaacaaatagtagtcatagcaaaactagcatccccaagcttgaggttttgcatatcattagcacaattgtcattaagagaatttatgatagcatcatttcaatcatgcttttcatcgaaggaactatcaagtacgggtgcaatagcaacaatctcatgtttaacataaggaactatagcaaattcatattcataaatattggcatcatggccacaagaatagcaagaatcatgatcatcaagggatatttcaatcatatcttcggaatcacaattatc

SEQ ID NO: 6265 - DNA, 439 bp, Triticum aestivum
  Clone ID: LIB104-055-Q1-E1-F5
ggtaccgatctagaattcccggttcgacgggcaaggatacgccagactgacagaaacgtaccttacaacacgctgatatgcaaattgcggctgcgcgggcacataccggtgcaccaaatcgagtctaaggaatctgtgcaacagggtgtgcaacacgtgatgccggcaatgcagctgcttgccccccggcaccgccggcaacgaggacatctgcccctgctacgctcacatgaccacgcacgaaggccgctatagttgcccacgatacaatcgccatctccacggtcaatcacgactactacataatcgatcgtcatggcctctcaattaatatcacatccacgatgagcgacagctagactagcatgaagcacgatcgatatgatacatgtactactcaagctagtgctgcaaactatgtaccttgtgcccacccata

SEQ ID NO: 6266 - DNA, 414 bp, Triticum aestivum
  Clone ID: LIB104-055-Q1-E1-F8
aggtaccagtctagaattgccgggtcgacggggagcacaaggagaagaaggacaagaagaagaagaaggacaagaagcacggcgagggccacaaggacgacgacggccacggcagcagcagcagcgacagcgacagcgactgagccagctccggccgcgtgcagtgcaggggagatgaacgcgtgggttaatttggagcgtgtggtagcatatgtatgtaatgcttgacatgtctcatggatcttgtaatgtaataaccggctgcactgcatggtgcttgtaataataacgttaaggaatttccattggtaacaaaaaaaaaaaaaaaaaaaaaaaaaaaacaacaaaaaacaaaaggaaaaaaaacaaaaaacaacaaaaaaaaaaagcggccgccctaaaggatccaagctt

SEQ ID NO: 6267 - DNA, 273 bp, Triticum aestivum
  Clone ID: LIB104-055-Q1-E1-G1
cgggtcgaccgggaaagagaggaaaaaatgtactgtagacaacagtggggtggttaattccttgtaagttgttaaaaatgaaagaaacaacaatggggtggttgatttctaaaaaaaaaaaaaaaaaaaaaaaaaaaaaaaaaaaaaaaaaaaaaaaaaaaaaaaaaaaaaaaaaaaaaaaaaaaaaaaaaaccggccgcccaaaaggatcaaagcttacgtacccgtgcatgcaacgtcaaaactcttcaaaagtgtcaccaaaattcaatt

SEQ ID NO: 6268 - DNA, 421 bp, Triticum aestivum
  Clone ID: LIB104-055-Q1-E1-G5
aggtaccgatctagaattcccgggccgacggggcggataactccgcatgggatatcgatagcagcccagaaaggcgcccccgagataagcccctggccaaatcatgagtattcaaagactcgacgcattcatatatcagcctctttacttcataattttaacatgttgaatcatgtacttgcacttcggctcgttccgccctcgagcgatcctcatcttcggggaactcgctggacccaaaggtgatggacaatgggtcccttccgacggcctcctctcccagggccatggatgacaccaaggtgttgtcccaaaggatcccaggctagggagagacgcatgaggccttcagggcggtgacagaaggcgagacctcgaccgcctgacacatgggggagaagatcccatggagaccggcgat

SEQ ID NO: 6269 - DNA, 180 bp, Triticum aestivum
  Clone ID: LIB104-055-Q1-E1-G6
gacggggtactaaaaaaaaaaaaacaaaaaaaaaaaaaaaataaaaaaaaacaaaaaaaaaaaaaaatgaaaaaaaaaaaaaaacaaaaaaaaaaaaaaccggacgccctaaaggatccaaccttacttacccttgcatgcaacgtcaaaccccttctaaactgtcaccaaaattcaatt

SEQ ID NO: 6270 - DNA, 455 bp, Triticum aestivum
  Clone ID: LIB104-055-Q1-E1-G7
ggtaccgatcaagaattcccgggtcgacgggctattttaaaaattagaaaggaagggcaagattgaagatgcaaacaaaaatatagttggacacttccattctcagctcactcaagacatgaatatcttgcatagaaacatctcaacttcggtctctcaacaggagagccaactgaaagtacttgaagaggagatgcaatcttttatcacctcgaagggcaaggttgttggaggacttcaaaatcaagtaagagaaatgaaagagagcttcagttcaaggattgcagaattgcatggctttgctaatgagctcaacctcaaatcccaattaagctctgagaagctgaatgcccaagttagcgcacacacatctgatctggaggattgtttgaagggcctcttagctgatgctgaccaattactcattgggctacaaaatgggctccctcagcaag

SEQ ID NO: 6271 - DNA, 165 bp, Triticum aestivum
  Clone ID: LIB104-055-Q1-E1-G9
accggtcatgtattccgggtcgacgcggggagctttaaagatctagaggggggaaaaaaaaaaagcggccgctcaaaaggaatccggccgcacgtacacgatccatgctaacttacacgtctacgagacttcaaaccacttccatatcgtcacccatcttcaaat

SEQ ID NO: 6272 - DNA, 437 bp, Triticum aestivum
  unsure at all n locations
  Clone ID: LIB104-055-Q1-E1-H1
ccggtccagaaatcccgggtcgacgggaagaagcccaaggccgagaagcggctgccggcggggaagtcggccgccaaggagggcggcgacaagaagggcaagaagaaggccaagaagagcgtggagacgtacaagatctacatcttcaaggtgctgaagcaggtgcaccccgacatcggcatctcctccaaggccatgtccatcatgaactccttcatcaacgacatcttcgagaagctcgccggcgaggccgccaagctggcgcggtacaacaagaagccaaccatcacgtcccgggagatccagacctccgtccgcctcgtcctccccggcgagctcgccaagcacgccgtctccgagggcaccaaggctgtcaccaagttcacctcctcttaggctgttcgtcttcctgtgtctcgtanttagctgttccggtg

SEQ ID NO: 6273 - DNA, 419 bp, Triticum aestivum
  unsure at all n locations
  Clone ID: LIB104-055-Q1-E1-H3
ccggtccagnaatcccgggtcgacgggggtaccgagatgatcatcggggcagagattctagaaggcgaagtcggagtcggagtggagatagatatggacgtgacaggtacagagagagggatcatcatcgtcgtagcaggagtcttagcgctagtcctgatgattacaagaggcgtggcagagacagaagtcctagtcgtagcaggagccgcagctacagtcctgatgatgacaggaagggtggcagagacagtttgtcgcctgcacgcagaagcactagtcgctcccctcgcaagacaccacctcctcgcaagacaccacctcctcgcgaggggtctcctgctaggcgcaatgatgaccggtctcctgttgggcgcaatgatgaccggtctcctgttaggcgcaacgatgaccggtct

SEQ ID NO: 6274 - DNA, 436 bp, Triticum aestivum
  Clone ID: LIB104-055-Q1-E1-H5
aggtaccgagtcagaattcccgggtcgacgggagtcataaaatcctacataaaacttgtagatcactgaatatgatatgtttgattccttgcaatagttttgcgatataaagatggtgatattagagtcatgctagtgggtagttgtggattgtagaaatacttgtgttgaagtttgtgattcccgtagcatgcacgtatggtgaaccgttatgtaacgaagttggagcatgaggtatttattgattgtcttccttatgagtggcggtcggggacgagcgatggtcttttcctaccaatctatccccctaggggcatgcatagtattactttgcttcgagggctaataaacttttgcaataagtatatgagttctttatgactaatgtgagtccatggattatacgcactctcacccttccatcattgctagcctc

SEQ ID NO: 6275 - DNA, 433 bp, Triticum aestivum
  Clone ID: LIB104-055-Q1-E1-H7
caggtaccgatctagaattcccgggtcgacggggcgttgcaagctgcaggtgaagttcaagatttctccatggtggacaggattttgttgggatatcacaatatctcttatattattaatgcatctatatacttggtaaagggtggatggctcggccttatgcctggtgttttgttccactcttgcctccctagtttccgtcataccggtgttatgttcccggattttgcgttccttacgcgatcgggtgatttatgggacccccctgacagttcgctttgaataaaactcctccagcaaggcccaaccttggttttaccatttgcctcaccaccacctacttttcccttgggagtcgctctctcgagggtcatctttattttagcccccccgggccaatgcttgtctaagtgctggtccaaaccgagcgatg

SEQ ID NO: 6276 - DNA, 388 bp, Triticum aestivum
  Clone ID: LIB104-055-Q1-E1-H8
attcccgggccgacgggcctccggaagtaccacaagaactaccagcgcgagacgtggggccgcgtgctgaacgtgctccgcgacgacggcgggatcacggtgaaggggcacgtgcagaagccggtgctcaaggagcggttcaagcagttcaacgcggccatggacgagatccagcggacgcagggcgcgtgggtggtgagcgacgagcagctgcagtcggagctccgggtatccatcgccgccgtcgtggtgccggcgtaccggtccttcctcggccgcttcgcgcagcacttcaccgcggggaggcagacggagaagtacatcaagttgagcgcggacgacctcgagggcatcatcgaggagctctttgagggcagcgccgggtcca

SEQ ID NO: 6277 - DNA, 174 bp, Triticum aestivum
  Clone ID: LIB104-056-Q1-E1-B1
ctgagctactgactcatcggtcgatcgttttgctttgttgaatttgcggttgcatcgtcgtgtctagttgctggacatatcatctaaattcaattcgtttcgagttcttgtcaaaagttgtcactgggaaaaccctggagtatcatcgcttctgcgatctacaacaaatgctta

SEQ ID NO: 6278 - DNA, 433 bp, Triticum aestivum
  Clone ID: LIB104-056-Q1-E1-B7
attcgcgggtcgacgggtccaaagattggggattcccaaggcaccccaaggtaatattcaaggacaaccaagagcctaagcttggggatgccccggatggcatcccctctttcgtcttcgttcatcggtaactttacttggagctatatttttattcaccacatgatatgtgttttgcttggagcgtcattttattttattttgttttgcttgctgtttgaataatataccaagatctgaaattcttaaatgttagagagtcttcacatagttgcataattattcgactactcattgatcttcacttatatctttcagagtagtttgtcatttgctctagtgcttcacttatatccttttagagcacggcagtggttttattttgaagaaatagatgaactctcatgcttcacttatattattttgagattct

SEQ ID NO: 6279 - DNA, 378 bp, Triticum aestivum
  Clone ID: LIB104-056-Q1-E1-D5
ggtaccgatctagaattcgccggtcgacgggaggaagcactccgtagaggatgctctatggaaaatcatgtcacttacctcccaaaataaaaaagacagcttagtcggctacttaccaactcaactacgaatttaaacctaccggtgagaaaaggttactttacactacctcaccatatgaatgatcatcccaagcctacaaatatgccacgttgtttaaagaacaagttaaaacgtggcatgagatcaaatacacaagcgtgactttaacatcggtgattacgtctagctatacaactctcatttaaaattttttgcataccaccatcgatccaaattgtaacgtccctacataagcgacgatgtctaccgtaccgg

SEQ ID NO: 6280 - DNA, 388 bp, Triticum aestivum
  Clone ID: LIB104-056-Q1-E1-E7
acggcaaaatgcagtacaggatacagttccagaggccaaaccccgtcggcaccaacaatgcgcctccaccgccaaccaccgcggcgacagcagcgccgacatcgacccccgcgagctccttcctcgccatggttcaataggcgctcagcaccatggatcatcagtatacttccagttccagacagacaataacctcgaagcatcatcaccatcaccatcaccgagtcaccgttccatgcgtcacctcctcgagtcgatcatcgccatcacatcacaccatcaccgacgacgactgttccttttcaccttgtaattcctctcgtgccattccattatttattgattcgttctgtgtaataagagcctctcttctgttccctaaaccggc

SEQ ID NO: 6281 - DNA, 249 bp, Triticum aestivum
  Clone ID: LIB104-056-Q1-E1-G6
cggggtaaaacagataatatcgatataggttattctacaagattactctatagatccatcagctctaagtaaactgcgtataaatcatgtatgtataaggtatgtgttactgatgttagaagcaaaaaaaaaaaaaaaaaaaaaaaaaaaaaagcggccgctccaaaggatccaaacttacgtatgcctgcaaacgaaatcataactcatccagagagtcacataaaattaaatcacagggccttttta

SEQ ID NO: 6282 - DNA, 374 bp, Triticum aestivum
  unsure at all n locations
  Clone ID: LIB104-056-Q1-E1-G7
gacggggagcacaaagagggcatgatggagaagatcaaggacaagatcagcggcgacggccacggcgacggcaagaaggacggcgagcacaatgagaagaaggacaagaagaagaagaaggacaagaagcacggcgagggccacaaggacgacgacggccacggcagcagcagcagcgacagcgacagcgactgagccagctccggccgcgctccggcagcagcgtgcagtgtaggcgagatcgatgaacgcttgggagaagtgtggcatacatatatgttgcagggtttggagcgtgtggtagcatatgtatgtaatgcgtgacatgtctcatggatcntgtgatgtataataattagccggctgcactgcac

SEQ ID NO: 6283 - DNA, 426 bp, Triticum aestivum
  Clone ID: LIB104-056-Q1-E1-G8
gacgggagaacgaaccggaaacccaagaagaggaagactgcatctgacatgttccagctggatgatgtttctgagtcagaggtagcccctgactcccttggccaatttccaactatcttattgacactgactattgccaggacgacacgggggccagccaggccgtggaagaagaggtaactatttcctccgactcagcccctttgccgagacaaaaacttcgaatggtaacccggaaagtaaggttttcacaccatttggcttatttggaccctcattttcttttgaaaagcagcaacatgagagtcaccgtcaggcccggactaatgatgatgatgatgaaccaccttccgaattacaaaaaactcatcaaaaatgccagaatgaggtttctttcacctttgtccttttgttttatccatgaat

SEQ ID NO: 6284 - DNA, 431 bp, Triticum aestivum
  Clone ID: LIB104-056-Q1-E1-H1
ccgggtcgacggggcgtcttgtattcatcaagcatagtgtgagccatctcaacaggagttctgttcttgcgctccacgacgccattctgctgaggagtacaaggaccagataactcatgagtaatatcaagttcattaagatagtcatcaagaccagaattcttgaactcggtcccattgtcacttctgatgtgcttgatcttcacaccaaagttggttgaagccctcgaggaaaatcgtttgaagacttcctgcacctcatgtttgtaagtgacaatgtgcacccatgtgtaacgagaataatcatcaacaataacaaagccatatagagacgcatcatttgtaactgtggaataatgattaggaccaaagagatccatgtgaagcaattcaaatggtcgagtggtagtcatgatagtctttgctggatg

SEQ ID NO: 6285 - DNA, 432 bp, Triticum aestivum
  Clone ID: LIB104-056-Q1-E1-H5
gtaccgatctagaattcgcgggccgacggggatcttaatctttttgctatggattggtacacaagtttcttaggacttcctaatttggtagaatttttgcggttccagaagtatacgtttgttacagattactacagactattctatttttgacagattctgttttctatgtgttgtttgcttattttgatgaatctatgagtagtatcgaagggtatgaaccatagagaagttataatacagtagatattacaccaatatgaatttagaatgagttcattacagtacctaagtggtggttttattttcttatactaacaaagcttacgagttttttgttgagttttgtgttgtggagttttcaagttttgggtaaagattcgatggactatgggataaggagtggcaagagcctaagcttggggatgccca

SEQ ID NO: 6286 - DNA, 360 bp, Triticum aestivum
  Clone ID: LIB104-056-Q1-E1-H7
cgggtcgacggggttgcacattcagctggctagacgcggtcggcgggaaaccgagacaaaaaagcctatcacttcgtttggttgttgatattcaagcctaggtataaatattggcacgggataccccgaattcccctgtttagatggacaaggaatcagtccaccgaattggcctcaaatattgggtggcccgcttcgaaagcccgcgtctctattcccaaattcggagggggcgagctcgattttcggtgatattcgggaaccagcccgcgacttaccgcttcgaccgctccagaaaaggaagaggtgcactcgagcgggagagaaggtgagcacaacggcggcgcatgtcagacaact

SEQ ID NO: 6287 - DNA, 365 bp, Triticum aestivum
  Clone ID: LIB104-056-Q1-E1-H8
acgggccaaaaaaaacaaaaaaaaaaaaaaaaaacaaaaaaaaaaaaaaaaaaaaaaaaaaaaaaacatcaataggatgataaaaatataaagcctaagtaaaaataatatggaacagaataccccgaaattcccctgaaaaaatggggccccccaaaagtttccagccttggtttcccttattggaaggccaaatcccttaaaaagggtccccaaacttaatttcaggggcggttatttaaaaattccgtgatgggaaaaacctaggctttacacaatttaacccccttggacaaaaaccccctttcgccaattgggctaaaaacaaaggggcccccaccgttgccccttccaaaaattttccc

SEQ ID NO: 6288 - DNA, 457 bp, Triticum aestivum
  unsure at all n locations
  Clone ID: LIB104-057-Q1-E1-A6
attcncgggtcgacgggctctcttaattcacttatatctatttagggagatgacagaaattggtcattcacatggttagtcataaaatactacataaacttgtagatcgctgaatatgatatgtttgattccttgcaatagttttgcgatataaaggtggtgatattagagttatgctaatgggtgaatgtggattagtagaaacacttgtgtcgaggtttgtgattcccgtagcatgcacgcatggtgaactgctttgtgatgaagttggagcacaattttatttattgattgtcttctttatgagtggcggtcggggacgagcgatggtcttttcctaccaatctattcccctaggagcatgcgcgtagtactttgttttcaatggcttgtagatttttgcaataagtatatgagttctttatgactaatgttgagtccatggattatacacact

SEQ ID NO: 6289 - DNA, 406 bp, Triticum aestivum
  Clone ID: LIB104-057-Q1-E1-B10
ggaatccctatagtgagtcttattaagttatcaaagcaaagtattacgtgcatgctcctagggggatagattggtaggaaaagaccatcgctcgtccccgaccgccactcataaggaagacaatcaataaataaatcatgctccgactttatcacataacggttcaccatacgtgcatgctacgggaataacaaactttaacacaagtatttctcaaattcacaactactcaactagcatgactctaatatcaccatctccatatctcaaaacaattatcaagcatcaaacttctcttagtattcaacacactcgtaagataattttattattaatctcttatacctagcatattaggattatttaagaaaattaccatgctatttaagactctcaaaataatcta

SEQ ID NO: 6290 - DNA, 122 bp, Triticum aestivum
  Clone ID: LIB104-057-Q1-E1-D9
agtgagtcgtattaggacagctgcacggacggagcggtcagggtgtcaaggcatcggcgagtcgaagtcatacagaattgcagcaccacagttgaacagcgaccgcgggaacgacgtgcgag

SEQ ID NO: 6291 - DNA, 338 bp, Triticum aestivum
  Clone ID: LIB104-057-Q1-E1-E10
gtattagaattagaagttgtaaatatgcattgttgtatcgcgacctgaatgaaataaacgaaataatgctcttgttcaaaaaaaaaaaaaaaaaaaaaaaaaaaaaaaaaaaaaaaaaaaaaaaaaaaaaaaaaaaaaaaaaaaaaaaaaaaaaaaaaaaaaaaaaaaaaaaaaagcggccgctcaaaaggatcaaacctaatttacccttgaatgcaacttcaaacctcttcaaaattgtaaccaaaattaaattcaagggccttcgtttaaaaacttcttaacgggaaaaacccgggcttaaccaaactaaatccccttgaaaaaaatcccccttt

SEQ ID NO: 6292 - DNA, 312 bp, Triticum aestivum
  Clone ID: LIB104-057-Q1-E1-E5
tgagtcgtattattgcagaatgaaatccactcaacctcttgcaatctccatcaaactgaactgaacaggctgtaaaatttaagggagaaaataagctgacagcctgcccctttctactttgcagcagccagatcaatgtgcatataacttgcgctcattccttccaatatgtagtactcttccaagtttataaaatacgaaagtggcccggcacgcaccgttccacacccccaaaaggatcaaacctaacaaacgcggccgctccacatgatccacccttacgtacgcgtccatgccatgtcttacctcttc

SEQ ID NO: 6293 - DNA, 408 bp, Triticum aestivum
  Clone ID: LIB104-057-Q1-E1-E6
ctaaagtgagtcgtattagctcctatctttcgtgaagccaaatagcttccagggtgctgtcaaggcaatgaacgaaagaattctctcggtccttgatgcgtctggctctggccgcgttgatcttgggatgttctttgctagcattgctccaatctgttctgggcctgtggataggcgcaagcgtgtcgtcttcgatgcactcctttggcgtcctgcaagcgaaggtggtaggggccagatcaggaggagtgacgcgctaagttacattaaacttctccgtgccgtttacataccaacccatggggctagcgacatgcttgaaatgcatggggagtctgaccctaccatggtatcgtacacacaggttccttgagatgttcaatgatcctgattggggttttggaattc

SEQ ID NO: 6294 - DNA, 372 bp, Triticum aestivum
  Clone ID: LIB104-057-Q1-E1-E9
tagtgagtcgtattaactccctccgttcctagatgtagggtgtacaatttttgacagggatattacagaacgcacatgaaaggataatttcacaagttttgggcgaggttacacctgactaattaacatgagaaaatagaggagattgcctaatacatggaaatgtaattatatccctaaaaaaattatccacacgagtggtgcaacgcaatacaccttatatttcaggttctttctcaaaatcctatacaccttatatcaaggaacggagggaatacttacttactcggtcaatcaattaacacgacatccgctagccccattacatgtgcacacggatcggcaatggatcgatcaacggctggagaccgc

SEQ ID NO: 6295 - DNA, 148 bp, Triticum aestivum
  Clone ID: LIB104-057-Q1-E1-F8
gtgagtcgtattacaactacgacaatgactacgacgtcgactacgacgaataccttgacgaccatcttgttccaagaacggggctcaactacagtctgtctactagcaccagctccatcgtacttggttccatcatcgcgtcgattgg

SEQ ID NO: 6296 - DNA, 382 bp, Triticum aestivum
  Clone ID: LIB104-057-Q1-E1-F9
agtgagtcgtattatgcacagagaaggcatcaataatgcaacgaactctgtaactgttgttgctgcgctttttgctaccgttgctttcgcagctatattcactgtacctggtggaaatgacaacaatggagttgcgattgttgtccagactgcctcctttaggagattcttcagctttaatgccatagctctgttcacatcattggcggtggtcgtggttcaaataacagttgtcaggggtgaaacaaagtccgagcgaaaggttgttgaggtgatcaacaagcttatgtggctggcatcagtttgcacaaccatttctttcattgcctcatgctacactgtgcaaggccgccatttccaatgggcagcaatactggttagt

SEQ ID NO: 6297 - DNA, 431 bp, Triticum aestivum
  Clone ID: LIB104-057-Q1-E1-G11
ggtaacggtctacaattcccgggtcgacggggtgggtgaatggtaccggcgaaagttgcgcggcacaagagaggctagcaatggtggaagggtgagagtgcgtatgatccatggactcatcattagtcgtaaagaactcatatgcttattgcaaaaatctacaagttattgaaacaaagtactacgcgcatgctcctagggggatagattggtaggaaaagaccatcgcttgtccccgaccgccactcataaggaagacaatcaataaataaagcgtgctccaacttcatcacaaagcggttcaccatacgtgcatgctatgggaatcacaaacttcaacacaagtattcctcaaattcatgattactccactagcatgactctaatatcaccatcctcatatctcaaaacaattatcaagcatcaaattg

SEQ ID NO: 6298 - DNA, 446 bp, Triticum aestivum
  Clone ID: LIB104-057-Q1-E1-G6
ttcccgggtcgacgggttctccccagctacgccaaatctggaggcaccttcaccaggcctattcgtaagtacggcaagcacgtgttctcccacatatgacattctgctgcgtcaagcagccgcctggcggtcagaagggtgcctactacgccatccatcacatgcgggcgatcgtacgggaccatcatcaacttctgctaccgagtaaactcaaagattgggccgcgagcgtgtcggcaatccaggacgcggacatcagacaagaattctttcgcatccagtcggagtttgcagaaatcatccatcaagatgtccttcgtacctcggggcagttctacctcagaaatcaaccgtccaacagtgacatcgacacaatgctacaaatgcaggctgacaacgcccgttatttcatgactcccatgatagacggcggcttcatccacgct

SEQ ID NO: 6299 - DNA, 380 bp, Triticum aestivum
  Clone ID: LIB104-057-Q1-E1-H10
accctatagtgagtcgtattattactctttacgaatctgaaaattttgacatacttgaatattgctatgaaaactatgctcataatgtctatgtcaaagaatttattgaaagaatgaccgttgcttctaaagaaaataatgatacgcatgaatctttagataattgtgatcccgatgatttgattgaaatatcccttgatgaacatgatgctttctattcttgtggccatgatgccaatatttttgaagacgaatttgctataattccttatgttaaacatgagatcattgctattgcacccatacttgatagttccttccacgaaaagcatgactgcaatgattttactataaattcccttgatgtcaattgtgctaat

SEQ ID NO: 6300 - DNA, 421 bp, Triticum aestivum
  Clone ID: LIB104-057-Q1-E1-H9
ggtctaaaattcccgggtcgacgggttccttgattgaaaagtatgatattactctttacgaatctgaaaattttgacatacttgaatattgctatgaaaactatgctcataatgtctatgtcaaagaatttattgaaagaatgaccgttgcttctaaagaaaataatgatacgcatgaatctttagataattgtgatcccgatgatttgattgaaatatcccttgatgaacatgatgctttctattcttgtggccatgatgccaatatttttgaagacgaatttgctataattccttatgttaaacatgagatcattgctattgcacccatacttgatagttccttcgacgaaaagcatgactgcaatgattttactataaattctcttgatgtcaattgtgctaataatatgcaaaacct

SEQ ID NO: 6301 - DNA, 397 bp, Triticum aestivum
  Clone ID: LIB104-058-Q1-E1-A1
ggtaccggtcaggaattcccgggccgacggggatgacaagatgaagtacaccatagagttccagaagcacaaagagggcggaagcagtagcgctcctgctgccccagcgacagctgcgacggtggtgacgagttcggccccgacaggcagcaccttccttgccgttcagtaggcgcccgtgccgaaagaaaccaggaacaagcttccccttcggttcatgagcaccagcagcccttggcaacatcctataccatttgttgatttgtttcggtaataccaacctcattggtcaaaagacaaaaggaaaaccaaaccgaaataagtggctcccctctgtgatttcataagtacactggaaaacaggggaggtgccagattaatagaaatcccaaacagc

SEQ ID NO: 6302 - DNA, 438 bp, Triticum aestivum
  Clone ID: LIB104-058-Q1-E1-A10
gacgggccaccctaccatcattgctagcctcttcggtaccgtgcattgccatttctcacattgagagttggtgcaaacttcgccggtgcgtccaaaccccgtgatatgatacgctctttcacacataaacctccttatatcttcctcaaaacagccaccatacctacctattatgtcatttccatagccattccgagatatattgccatgcaactttccaccatgcattccgtttatcatgacacattcatcattgtcagattgcttagcatgatcatgtagttgacatagtatttgtggcaaagccaccgttcataattctttcatacatgtcactcttggattattgcatatcccggtacaccgccggaggcattcatatagagtaatattttgttctaagtatcgagttgtaattcttgagttgtaaataaatat

SEQ ID NO: 6303 - DNA, 429 bp, Triticum aestivum
  Clone ID: LIB104-058-Q1-E1-A4
ccggtcaggaattcccgggtcgacgggtagtctattgttttctttctctaacggagctcacgagatttctgttgagttttgtgttgtgaagttttcaagttttgggtgaattcttttgatggattatggaacaaggagtggcaagagcctaagcttggggatgcccatggcaccgccaagataatacaagtacaccaaaaagtcaaagcttggggatgccccagaaggcatcccctctttcgtccacttccatcggtaatttacttggagctatatttttattcaccaacatgatatgtgttttgcttggagcgtcttgtattatttgtgtctttgcttgttagtttaccacaatcatcctttctgtacacacatcttgagagagccatacattaattgaaatttgttagaatactctatgtgcttcac

SEQ ID NO: 6304 - DNA, 430 bp, Triticum aestivum
  Clone ID: LIB104-058-Q1-E1-A6
ggtacaggtcaggaattcccgggccgacggggattttacagatgagtacactccggtttcgcggggaaagaagggatatgagaaggagaaaagcacttccaatagcaaggtgaaggcttctaaagtacagaacgaagaaaccggttctgatgatgaatgcaagccaaaatctcagaagagaagtccagctgcgggcaaacccaagatttccaagattaagaaaccaaaaggtgaatatgatgatacaaaggaggaaaagaaaataaacaaggaagttggtatcaagaaagatgaaacgaaggctgctggggtgaagaatgagggggcgacttctacatggctgaaacctatgatgtccatgtcctcggcatcgatctttctatcaacatggtttcgttcgcaattgatcgtgccatcgggcgctcatgct

SEQ ID NO: 6305 - DNA, 413 bp, Triticum aestivum
  Clone ID: LIB104-058-Q1-E1-A7
gaattcccggctcgacgggcaaccataatctctacgtttgttctccgctattagtggctttggagtgactctttgttgcatgttgagggattgttatatgatctatgtatgttattattgttgacagaacttgcactagtgaaagtatgaaccctacgccttgtttcctaccattgcaataccatttacgctcacttttatcattagttaccttgctgtttttatattttcagtttacaaatacctttatctaccttccatattgcacttgtatcactatctcttcgccgaactattgcacctatacaaattactattgtattgggtgtgttggggacacaatagactctttgttatttggttgcatggttgtttgacagagaccatcttcatcctacacctcccacggattg

SEQ ID NO: 6306 - DNA, 381 bp, Triticum aestivum
  Clone ID: LIB104-058-Q1-E1-A8
ggtacaggtcaggaattcccgagctcgacggggaacgtaatccccacggtacgccggttccaagttcagtatccgcccccgcatggccgatatcgccatccgcaatgccgcgctaagtgagcacatgcttgccgtacatacatgccgaagaactccacgccggcggtcgtggtcgcgtctgccgccatggtagcgctggctgtcgctaaccgcgtgctcgaaaagctcgcgctggtgcccctcaagtcctacgccttcttcctcgctcatctcagcatgttcgggtacctcggcctgtacgtttcaatacgctaagtgatgtaccgcgcgggggtggtgaccctggacatgctggaactgccacagatccggttcgctgtc

SEQ ID NO: 6307 - DNA, 146 bp, Triticum aestivum
  Clone ID: LIB104-058-Q1-E1-A9
taccggtctagaattcccgggtcgacgggaagttataagacgaccatctagaaggagggtgtgacgtcaagcacaagcactattatcacgggaacatgctataatgatggcgccatgatcccattgagaagtcgagggcacattta

SEQ ID NO: 6308 - DNA, 220 bp, Triticum aestivum
  Clone ID: LIB104-058-Q1-E1-B1
ggtcaggaaatcccgggtcgacgggaacacgatcatccgcttctaaaactccgttgcagaagaatgtccttaagcaggatagcagaggtccaagacgatcgaataagcacggcctcccgtctgggagttcctaacgacacctggatctccggggtcttcaagtccttccatccatacacggtggcatctggcaccaccgatacaccatcgggctgcatca

SEQ ID NO: 6309 - DNA, 231 bp, Triticum aestivum
  Clone ID: LIB104-058-Q1-E1-B10
gacggggaaacacactcacaatcaatgttcgccgcgattagaggctttggaatgccgccgcgctacaggatgcaggattgcgtgcgcatgcatgctaagttcatactcttcaaaaatgtctgcgaaatgcaagtaagaggccgtcgccttatatcctaccaacggggaacaatttacgctcacctatatcaatagccatgcagcagatctcactttcgcaatctaggataa

SEQ ID NO: 6310 - DNA, 445 bp, Triticum aestivum
  Clone ID: LIB104-058-Q1-E1-B12
atacccgggccgacgggttcgctaacgaggagcccgttgagtttgcttttcaggatccagtcaactctgacgactgtgcaggcaagatgatcataccctcgaaatcagtactatctttgctatgctagtttgctcgctcttttgctatgccattgctatgatgcctaccaattgcttgcaagcctcccaaattgccatgtcaaacctctaacccacctttatcctagcaaaccgttgattggctatgttaccgctttgctcatcccctcttatagcgttgctagttgcaggtgaagattggaggtcgttccttattggaacatcttttatttacttgttgggatatcattatattgccatgttatcttaatgcacctatatacttggtaaagggtggaaggctcggcctctcgcctagtgttttgttccactcttgccgccctag

SEQ ID NO: 6311 - DNA, 415 bp, Triticum aestivum
  Clone ID: LIB104-058-Q1-E1-B2
ggtcaggaattcccgggtcgacgggtatcgtaatcgagaggagggtcgttgggcagccgctgcgatggcgccatcggacccgagccgtcgtatgaggacgccgttccagatcaggttctacacctcttctcgtcggccatcaagcacgcacgtcgccggtcgcctccatgtcgccgcctctcgagagctttgtgcgtggaagagagccgcggggtgtgagaatgagatgaaacacgttccaagggctttgctgcaaatgtatgctgtgccggttactgggtgggtcccatgggtccaggtggcaacggtctgccagtcaacgcaactgcagcgagtttgggacctgggttgtacgccttgaaaacatttgggacccaattctatacttttgaagttttaggactagattgacaca

SEQ ID NO: 6312 - DNA, 171 bp, Triticum aestivum
  Clone ID: LIB104-058-Q1-E1-B3
cgggccgaccggatcgaaagtccaaatgattgcatgaagggatagacgacatcccgattcaagtgaaaaagattttgcaacaagcctgacatgcgagctctacatgatcgaagcttattgtgacatcaaagcgacttcagagctcttagaggaagacatcgcagtcaaagt

SEQ ID NO: 6313 - DNA, 426 bp, Triticum aestivum
  Clone ID: LIB104-058-Q1-E1-B4
ggtcaggaaatcccgggtcgacggggagcacaaggagaagaaggacaagaagaagaagaaggacaagaagcacggcgagggccacaaggacgacgacggccacggcagcagcagcagcgacagcgacagcgactgagccagctccggccgcgtgcagtgcaggggagatgaacgcgtgggttaatttggagcgtgtggtagcatatgtatgtaatgcttgacatgtctcatggatcttgtaatgtaataaccggctgcactgcatggtgcttgtaataataacgttaaggaatttccattggtaatttggtaccatccttttttccaagctttttgtgtatgtatgtatgtatgtggtgtctctgttcatctctggatctctccgaccgagcgtgattaacggctgggggatctttaggaatggtt

SEQ ID NO: 6314 - DNA, 428 bp, Triticum aestivum
  Clone ID: LIB104-058-Q1-E1-B6
caggtacaggtcaggaattcccgggccgacgggtacttggagctatatttttattcgccacatgatatgtgtttttcttggagcatcttgtatgatttgagtcttttctttttagtataccacaatcatccttgatgtacacaccttttgagagagacacacatgaattagaatttattagaatactctatgtgcttcacttatatcttttgagctatatagtttttgctctagtgcttcacttatatcttttagagcacgtcagtggttctattttatataaataattgatctctcatgattcacttatattatttttagagtcctttagaacaacatggcaattttcttttaggcataataagaactttcatataagtgcattgaatactaagagaagtttgatacttgatgattgttttgagata

SEQ ID NO: 6315 - DNA, 354 bp, Triticum aestivum
  Clone ID: LIB104-058-Q1-E1-B7
gatgcagcaattgaaagatgcacaggtacttgatgagatgccactaagtcaatctgctatctcaggttatattggatggtaatttattttacaatacaactacacctttcttgaatcagattcggactgtttgcgtgaaattttgttctatagctatttttgggtggctttctttgttttgctttatgttgtatagtcagtagaaaactcaagccccatcatctaacaattctgtagtaatgactgaaactattcgaggacaaatcttggattgttgttgtcgttggaatttagagttgcatggttgacacggtcaacatggcaaagaaagtatagaagatttgccaaaccagg

SEQ ID NO: 6316 - DNA, 439 bp, Triticum aestivum
  Clone ID: LIB104-058-Q1-E1-B8
ggtacaggtcaggaattcccgggtcgacggggcacatacacatgttccttggaatattgatggatcccaatgtcgtacttcaaaatgcagcacgcaagatcctagggtcagtgaatctgcctacacttcacatgtgtaaatctgcacttgatggtctcattgcaggtctggacaaatttccagaggatcaagatatatatggtgttctgttttccattggcaacaatcatgggagcttttcagccaatatagccaaacatttagccaacgatatcaatatggcatctgatggagagctgatcttggataaacctagaatcaaagcattgttaatggcttctgtcgtggctgcttatgatgataaagacataaaactggatatacccgcagttatattatcacatgcaattcccctatttgggatgatctcgtgtgcact

SEQ ID NO: 6317 - DNA, 213 bp, Triticum aestivum
  Clone ID: LIB104-058-Q1-E1-B9
gggtcgacgggaaaccttatcgtcaccaatggtgggagattcaccaccgactaccagcagacttgttctgagaagctccggtttgtcacagacaaatactcaaccttgcaccgaatgcgatagattttgaattacaccatgttgaaggcgctccatcatagcataccatgtatggctacatcccttcgagtattggcttaactaacttttagc

SEQ ID NO: 6318 - DNA, 441 bp, Triticum aestivum
  Clone ID: LIB104-058-Q1-E1-C1
ggtcaggaatacccgggtcgacgagaaggcaacgacagcggcagagccaacagatggcaagctgaaaccctctccggtagggctcgatcctggtgagattgagtccccggcaggggctgacgccagcacgacaggacccgcgcgaccgggtgaggaggcgtaggagaagaaaatggtgcagcacccactgtatttcgtcagcaacctcttgcagggggctaggtcgaggtactcaggtgtgcaaaagctgctctttgggctccttatggcttcgaggaagctgcgccattacttccaagcgcacgaaatcacggtggtcacccgcctcccattgcaacggatactacacaacccagatgcgatggggaggatcgtagaatgggtcctggagctgtcaagtttcggtttgaaagttttaaagtacctccatgattcagagca

SEQ ID NO: 6319 - DNA, 430 bp, Triticum aestivum
  Clone ID: LIB104-058-Q1-E1-C10
gggtcgacggggaccacaaagagaagaaggacaagaagaagaagaaggacaagaagcacggcgagggccacaaggacgacgacgaccaccacaacaccatcatcgcatcccattagcattctaccattttcctcggagagaagtagccagaaacagcagcgccatggccggcatcatgcacaagatcgaggagaagctccacatgggtggcggcagcgacgagcacaagaaggacgaggagcacaagaaggcggaggagcacaagaagaaggacggggagcacaagaaggacggcgagcacaaggagggcatgatggagaagatcaaggacaagatcagcggcgacggccacggcgacggcaagaaggacggcgaccacaaggagaagaacgacaagaagaagaagaaggacaagaagcacggcgagggc

SEQ ID NO: 6320 - DNA, 411 bp, Triticum aestivum
  Clone ID: LIB104-058-Q1-E1-C12
taccggtctagaattcccgggccgacggggcagcatatgtttgtgtaaacattactatatggaacagggttttgttcttgcgtgagtagtagaagcaatgaccctagtcaagcacaccatcctgaaaccttaatcatgctgacatcagcacagtcatcctaccatttggcgatgatgtaggctccaacgggacacgacatccgtaatgccctcgttgatcatgaccttatgtcgctactttcgcctaaggattatgtgattgctttcaagcaccatatcagagagcgcaccgagatgcattagcgaaccctccccgaaagcgaacttcacaatacatgctaccagaagtcgattaagacacgatgggatatctgccacgaatgaggcaagtacatgcacgccaattcattg

SEQ ID NO: 6321 - DNA, 406 bp, Triticum aestivum
  Clone ID: LIB104-058-Q1-E1-C2
cggtcaggacatcccgggtcgacggggaaagcaagcaggagtgtggtctccactcacatatgagagcaccataagaagaggggaggcttcgcatcacacatgatcttgccagttctggccgtggctcttcacgtcattgtcaacattaggatctacggctgggcataataggtcgcataaggacacatttaatgtgtcacattttctccacatcagctgtgaacactgtgcatatcgtgtcatgctgcctgcgtttaagacggttgtaagacagcgaagtgcttgataatgtaaactgaagaagtcatgtatcagatgtacaaccgcatcaagcatggagccaaattcaattcaatggccgtcgttttaaaacgtccgcactagaagatccaagcttacatccacc

SEQ ID NO: 6322 - DNA, 354 bp, Triticum aestivum
  Clone ID: LIB104-058-Q1-E1-C4
cggtcaggaattcccgggtcgacggggacagcttgaggtacaactgatcaaagtgcatccaatgctgaagacgactatcatgaggctgacaaggacgataaaggatcaggagaactgtgatcaaggcaacagtcatagactgctacacctgatagcacaggaagatgcactatcaggatcagttgcctcctcaagggtaaaatcaagcactgtccgagcttagatcagtcatcttatgcatatacattgaacgtgcagtcctcatttgaagacactaacgacacatacgccattcacgacctggatgcatgtggattccgcatcgtgaacctgattagtcaccatgtatccgca

SEQ ID NO: 6323 - DNA, 419 bp, Triticum aestivum
  Clone ID: LIB104-058-Q1-E1-C5
ggtataggtcaggaattcccgggtcgacgggatcataatgggctgctggaacatttggatgcagcgtaatggagtgattttcaaggctattccaacttccgttctctcttggagatcttcgtttcgggcagatatgcttttgcttaagcataggatcaaggacaagtttgctgatagactttctagttggattgatcagttcttaacataattatcatgttgcctcaaggtttcactaggactggagttgggtacggtgatctcttgtttatttgggacatctgtaaatatttttattgctttaatatatttaccgtagaacgattgttctacggttttcggttcaaaaaaaaggtgcaaggctggtcatgcgtggatgcctacattccagggccaatttcatcctgtttttctggtcc

SEQ ID NO: 6324 - DNA, 243 bp, Triticum aestivum
  Clone ID: LIB104-058-Q1-E1-C8
gtacaggtcaggaattcccgggtcgacgggaagctcatgatgctgcacaacatcaggaccaacctttgtatgaatacgacacagtgatgggataatgctcccccttttatgaacttctactactttgtcaacaacaagttgaagtagaaaaagtaagtaaaaccggccgcacgagaggattcaagcttacgtaagcgtgcatgcaacgtcagagctcttcaacagtgtcaccaaaattcaatt

SEQ ID NO: 6325 - DNA, 410 bp, Triticum aestivum
  Clone ID: LIB104-058-Q1-E1-C9
aattaccgggtcgacggggggcatggaatattcatttggccagatgaagatgctcaaaaactgtcatatcatttggcaaagccaaactggtacttgcctcacaaacatctcctctcgacataaacttggaataattatggtgatcaaatggctcaatgaaatgatgccaaattgtgtggagagatgttttatgggtataagaatgatctgggaatttatcatgatttttgaagcaatataaaatatacttgcttcataacctaacaatattgccagaatcaatgatttgcccctgtgctcacatagataattgtatgaggctgacaatgcgtggaatatgttaatatgatcacattaacgagtgtgcaaaagttcagctaatttgggtactcctagctagtacttccttc

SEQ ID NO: 6326 - DNA, 413 bp, Triticum aestivum
  Clone ID: LIB104-058-Q1-E1-D1
ggtcccggtcaggaatatcccgggtcgacgggcccaagacggcaccccccaagcctgcacccggcccgccgccatacgcccgtcaaaacaccgagacctccccctagacgtacgccgacaattgccatgcatgcatgatgccagtaatatggtatgcgaattaactaaagaagaagccacatatatcatggaggtacccggatatatagatagtgctcgatccataacttatagctggatttcaacacttatatatctagatttacgcccctcaaaaaatatatttagatttatgttattacagtagaaacaatgtcatgtatgacccacggtgattgtacttatactattcatgcaatatatatgtatataggaaaaaaaaacaatagacatcaaaaaaaaaaagcggccgc

SEQ ID NO: 6327 - DNA, 326 bp, Triticum aestivum
  Clone ID: LIB104-058-Q1-E1-D10
gggtcgacggggtgcaccaattaaagcagatttaggcagggagagatgacacacaacagatccatctatcgtcgctcgccactgctgcaatcttcctgcacctgacggattccgccgggggaccagtgctccgccctgtttacgctgctaactccccaagacttccttcgattacccccgctcgcttcactccttcgaccgatagtgtctggtcaccttcctccagataaacattaaatctcaatattcagatgtgtgtcatttgaaaatatatcaaagatgtgcttagcctaacatggttgcgctctagtagatacatgcataca

SEQ ID NO: 6328 - DNA, 454 bp, Triticum aestivum
  unsure at all n locations
  Clone ID: LIB104-058-Q1-E1-D11
ggtaccggtctagaattcccgggtcgacgggtgaccttaaatgttgcatatgcattgctataagactgtatctgaatgcccgtacattgaacaacactgacagtttttgtcttctggcctatgaaagctccgtctaaggaaggctgactcaaggatccatgcccttgattcttgctccgaaagtggacctgaaaaaactacaagttcgacgattgcgcgaggaacacaatgggttttctctgaatcatctggtaattttcccagtcttgtacatgttgttctttgaatcatgtggtatttctaagtgcactgcatgttgtgtggtggatacaaaaagaggacgcgacgactgatggctgttctctttacacttggcgtggttgacaggctatggagcangcaattttgctatttggtcaatgatggagatgaattcgggagagatgtggacggg

SEQ ID NO: 6329 - DNA, 397 bp, Triticum aestivum
  Clone ID: LIB104-058-Q1-E1-D12
ggtaccggtccagaattcccgggtcgacggggaggtctacgaggcatctcaatctattttgtgaacccatcagtcggataaagcacccactgggcaacggtgatctgacgcaccgccgcagttaagttttcatggcagccacttaaaggttctcatcatctcccatcccgatcgacttacaggcgccgctgtaaagccattatcatgatctaggaaaccacttttcaagggtgtcgcgatatccctatgtttcaccgacaacgtcttgaattatcagcttctaccggcaatcagtcccataggcgatttcggcatattaggattacagcagctcctgggagtctgcatcgcctattataacctccagatacctatgcccagattataaaagctccac

SEQ ID NO: 6330 - DNA, 419 bp, Triticum aestivum
  Clone ID: LIB104-058-Q1-E1-D5
taaggtcaggaattcccgggtcgacgggcagaagaaacgaatatgaaatcgcccctcgccttggtgaggtctgggccgtttacaaggactggaaggctggatggactgcacgcgattttagcagctgtgactatgagttggtggagatattctgccatactaattcgtccatacgagttcggctgctgaggaaggttgatggttacagggcagtatttacaagggagacaactgtggagaccataggcaaggatgagtacctgaagttctcccaccagatcccttgcttccatctgacaaacgaaggaggaggcaagcttcggggctgtttggagctcgatccttattccgtgccggaggagtttctcctgactgactgaccttgttcatgcatggtgaacctcctggaaggctctttt

SEQ ID NO: 6331 - DNA, 345 bp, Triticum aestivum
  Clone ID: LIB104-058-Q1-E1-D6
ggtacaggtcaggaattcccgggtcgacgggcatgcaataccaacagagattcgtcatgattttcaagtttgacattgcgccagaatatggctcaagggctgaattctcaggacactattatactacaagtcatcactgtcttcagccatcattctcagtcactgaaccaatcaaatcaatactatttttcatcaatgttttcttggaggtggtagttgttcattagtaaagaactaagctaaaattttgtaaacatagtctcaacataatgtgtcaatgatttcccatactaccattggacaaaatacactcaatgtggtccaatgcacagattgtctcaccat

SEQ ID NO: 6332 - DNA, 441 bp, Triticum aestivum
  Clone ID: LIB104-058-Q1-E1-D7
aggtacaggtcaggaattcccgggtcgacggggcgtggtgattgagatgtgctgccatacattgtattagctcggagagagcaaatggatcggatgtacctttgtgtgatgagtgtaattaagctgtgaccaatatgtacacggccgcatgttgcgttgcgtgggtgctgtcgccgttcttgtgtactccattgttgtgctgtgatcattcctttgaataaatcggctcgatcttcaaaaaaaaaaaaaaaaaaaaaaaaaaaaaaaaaaaaaaaaaaaaaaaaaaaaaaaaaaaaaaaaaaaaaagacacaccaaaggatcaaaaaaaaaaataacaataaaaacaaaatcaaaaaacaatcaaacacaaacacataaattcaaaaaaacaggcggtcgctaaaaaaaggggggccccccaaaaaatcccccccttctcg

SEQ ID NO: 6333 - DNA, 447 bp, Triticum aestivum
  Clone ID: LIB104-058-Q1-E1-D8
ggtaccggtcaggaattcccgggtcgacgggatagagtgggactaatgcccttaagattatcaagagtatatccaatagcaacacggtgcttcttcagagttctcaataatctccttcatgatctgaaaggttagcactaataataacaggatatatcttcttttcatcaagataagcatatttcaaagtatcaggtaattgtttaagctcaaacactggatcacccttgggtggaggagtatccccaaggatttcaacaggcaaattgtgtttcaaaacaggcatttgattaaagaatatttcatctaattccttcctctcattcataaacatatcattttcatggtctagcaaatattgttctaaatgatcaatgggaggcacgacaatagaagcaagatcaataatttcatccttactaggcaaattttttgtcatggggttgt

SEQ ID NO: 6334 - DNA, 462 bp, Triticum aestivum
  Clone ID: LIB104-058-Q1-E1-E11
aggtaccggtctagaattcccgggtcgacggggggcgcaagtgaaataccactacttttaacgttattttacttattccgtgggtcggaagcaagagctagaaaagctgctgcaagaccaggaagttatgaggacctctctattgcaatggtgctatgcaagctacagtgaggtatttagctcctggatgcatttctctgctgttcgtgtcttcgtagagagtattctgagatatggtctgcctgcacggttcctgtctgttgtcctagcaccatctacaaagagtgagaagaaagtaaggaacatcttggaagggctatgcggcaatgccaacagcagctactggagatccgaagatgacgtgggcatggctgctggcctgggaggcgagacagagtcccacccttatgtctccttcaccataaactttgtctgagcgtgtttgatgtatattattttgtg

SEQ ID NO: 6335 - DNA, 404 bp, Triticum aestivum
  Clone ID: LIB104-058-Q1-E1-E4
aggcaccggtcaggaaatcccgggtcgacggggaggttgagaagctgattggcaggatagtgaagtggctgaagcccggtgggcatattttcatcagggaatcgtgcttccaccagtctggggattccaagaggaaagtgaacccgacgcactaccgggagccgaggttctacaccaaggtgtttaaggaatgccactcctatgaccaagaggggaattcctttgagctttctctggtaacttccaagtgcattggagcttatgtgaaaagcaagaagaaccagaaccagatatgttggctgtgggagaaggtcaagtgcacagaagacaaaggctttcagagattcctggacaatgtgcagtacaaatccactggaatcttgcgttatgagcgcgtgtttggg

SEQ ID NO: 6336 - DNA, 343 bp, Triticum aestivum
  Clone ID: LIB104-058-Q1-E1-E5
aggtacaggtcaggaattcccgggccgacggggaagataaagaagcacgagctgagggccaaggccaaggagcttggccctgtgaagaagagcaggatgtgagctccgttgctgagatacatataggaatagtggaccgtggacgctagcgccatcgtgaataaaggttatgctctcgggaaattccttagtgaagacttgtctgtataagaaattcaagcactcgatagggcacgaatacgaacaagagggagatataacacgaactctgcttatgtgctccgctgtgtttcgttgttcagataaagacctcatggcttacgctgtgtagcctcttctaaaa

SEQ ID NO: 6337 - DNA, 445 bp, Triticum aestivum
  Clone ID: LIB104-058-Q1-E1-E6
tacaggtcaggaattcccgggtcgacgggaggcaagctggatctgcccacggaagcttccgatctgcccggcgggcgtcccaattcggtgccggtccgaagcctcaacgggggttcgggttttcccggggggcccaaatccgggcaaccggtggccggcaattttccggcaagcaacttggattccgtctgcgcctccaactcctgccacaacaggcgaagggctctgtgtgtgaaaatttacgatgatatgtcggtaaatattaaattcaagagatctgaggtgatgaaaggtgagaagatgttacaagccaggtgcttgtggagagggcggagaagagcggaaaaaaaaagagatgtgaacatctagaggcctttgccatgttgggtgcgctcgcaaggcaagccgccaccaataataaaaagtttttttttgccccgggggg

SEQ ID NO: 6338 - DNA, 426 bp, Triticum aestivum
  Clone ID: LIB104-058-Q1-E1-E7
aggtacaggtcaggaattcccgggtcgacggggatgacaaccttgctatggtggtggctgacgacgaccttgctatggtggtggctgacgacgaccctgctatggtggtggctgacgacgacctcgcgattgtggtgcctgacgctgacctcgcgttttggtgcctaatgatgacctcgcgatggtagtggcgccggcgattccacagctgggcgacaggaccatgccaattgtggtagaggagtacatccgcgttgggatttgccactctgagcgcatcaggttgatgaaggagaagaaggaggagtgaagatgttaagaaaatgaagtggtaatgttaagcatgttgggttaaagcttgtcaatgttaagtatgtcagctttaattttatgcatgctcatggatgctgtatgacagtgtcatct

SEQ ID NO: 6339 - DNA, 439 bp, Triticum aestivum
  Clone ID: LIB104-058-Q1-E1-F1
ggtcaggaattcccgggccgacgggcttctaaaccggtgtgagcgcccttcggttcgcgaggtgggactaaactctgaccgctactaggaccaactctttagtctcggtttgtggtatgaaccgggactaaagggtgagcctctggtcccgattcaagccaccaactgggaccaatggtggtgggccgggagcgaggcccattggtcccggtttgtcccaccaaccgggaccaaaggggccggacgaaccgggaccaatgcccccacgaggcccggcatgcgcctggccgcacgaaccgggaacaatgctcacattagtcccggttcgtgactgaaccgggactaatgtgaatattgccctgtgaccaaagcccagttttctactagtgaattctcatggagaacgaaacatttgaccatctagggcgtgcctccttcc

SEQ ID NO: 6340 - DNA, 470 bp, Triticum aestivum
  Clone ID: LIB104-058-Q1-E1-F11
acgctgccaggtaccggtcaagaattcccgggtcgacgggaaactcagattttcctcattattaaaaaatggaaacaaaaagttcaaaaaataaaaaagtagaagttcaactttgaaaaatagaacgcttcaaaatttcataaaaaagattaagaaatgaaaataggaagtccatattataaaggtggagaagttcgatgattatagaaaattcagattttccttgttattaaaaaatggaaacaagaagttcaaaaatgaaataataagaatttcaacttttaaaaatagagcgcttcaaaattcataaaagaggattaagaaattcagattaaaattcataaaaaactcagatatcttcatgtaaccaagaaacgttcagattgataactaacagaagttcacgtactacgcggtgtgcattttgtattaaaaaagaaagaaaaaataaaaggttgaaatatttgttg

SEQ ID NO: 6341 - DNA, 311 bp, Triticum aestivum
  Clone ID: LIB104-058-Q1-E1-F3
ggtcaggaaatcccgggtcgacgggatcctcaggcatgacaaattcgtcgtcgttgaggcttgcctcgtcttcggagggaggcatataattgtcatcctcgacctctctgtctgccgctctcttatgagggctggcttctccatcctcctgcgttgaatcctgctggagggggttgtcttcggaactgtccggggtgttattgtctcaaaaaaaaaaaaaaaaaaaaaaaaaaaaaagcggccgctctaaaggatccaagcttacttacgcttgcatgcaacttcatagctcttcaaaagtgtcacctaaa

SEQ ID NO: 6342 - DNA, 224 bp, Triticum aestivum
  Clone ID: LIB104-058-Q1-E1-F5
gaccggcaggtacaggtcaggaattcccgggtcgacggggagcagatcaactctgaaactaccgaaaagttccaagttttcagttccaaattttagcattggaagtctcaaggctcacatcgtactaaaaataatgccgaaaagacggattgaaacataaccaatccaaccgggataaggccaagggaatccgggcccaaaatccccaagaaccaattaggcaa

SEQ ID NO: 6343 - DNA, 447 bp, Triticum aestivum
  unsure at all n locations
  Clone ID: LIB104-058-Q1-E1-F6
ggtaccggtcaggaattcccgggtcgacgggaaggccccacacccctggtcaaggtgcaccaagacccccgcttagaaggaataagatcataccacgaagggataagatcaagatccctaaaaaggggggataacaatcggtggggaaggaaatgatgggatttctttcctcccacctttgccaacgccccaatggacttggagggcaagaaaccagccccctccagccctatatatagtggggaggcgcatgggagcttcacccttgcccctggcgcagccctccccctctctaactccacctcctcctcggtagtgcttggcgaagccctgccggagaactgcaagctccaccaccacgtcgtcgtgctgccggagccctccctcaacttctcctctcnccttgctggatcaggaaagangagatgtcccaaggctgtacgtgtg

SEQ ID NO: 6344 - DNA, 447 bp, Triticum aestivum
  Clone ID: LIB104-058-Q1-E1-F7
aggtacaggtcaggaattcccgggtcgacggggcttgtgttgaagttagcaagtcccgtagcatgcacgtatggttaaagttgtgtaacaaatttgaaacatgaagtgtacctggcttgtgcatccttatgagtggcggtcggggacgagcgatggtcttttcctaccaatctatccccctaggagcatgcgcgtagtacttggtttttgatgacttctaaatttttgcaataagtatatgagttcttttgactaatgttgagtccatggattatacacacttttacctttccgcctttgctagcctcttcggtaccgtgcattgccctttctcatcttgagagttggtgcaaacttcgccggtgcatccaaaccccgtgatacgatacgctctatcacacataaacctccctatatcttccttaaaacaaccaccatacctaccta

SEQ ID NO: 6345 - DNA, 454 bp, Triticum aestivum
  Clone ID: LIB104-058-Q1-E1-F8
aggtacaggtcaggaattcccgggtcgacgggttaccttctatgggtagttctatccttcacggaacttgtagtcttgcagacgctattgccaggcttgtagttgaacttgaaagacaattcatgcacaagcatccttgcatacaaaggattttcctagaattttctaatattgagcattcttctgttaagcgtgccgctactatctttttggctcatgagtttagattcataataaaagaggccaaagaaatatttgcgcattatagggtggacgcttgccgtcctcccatagagtctatccttttttatcaagaagaaataatgcgttttcaatctctagactatgtttctttcaatgaaaatcttagaaaaagggttccttccaatgttttagttgatagaatttctgagcttaatgatgatttgggcaattcgaaataatgaactaggat

SEQ ID NO: 6346 - DNA, 447 bp, Triticum aestivum
  Clone ID: LIB104-058-Q1-E1-G10
ggtctagaattaccgggtcgacgggttgtgttatgaagttttcaagttctgggtaaagatttgatggattatggaacaaggagtggcaagagcctaagcttggggatgcccatggtaccccaaggtaaaattcaaggacaccaaaaagcctaagcttggggatgccccggaaggcatcccctctttcgtcttcgtctatcggtaactttacttggaactatatttttattcaccacatgatatgtgttttgcttgtagcgtattgtatgatttgagtctttgatttttagtttaccacaatcatccttgatgtacacaccttttgagagagactcacataatttgaaatttattagaatactctatgtgcttcacttatatcttttgagctatatagtttttgctctagtgcttcacttatatcttttagagcacggtggtggtttt

SEQ ID NO: 6347 - DNA, 452 bp, Triticum aestivum
  Clone ID: LIB104-058-Q1-E1-G11
ggtctagaattaccgggtcgacgggcgacggtagaggcgcccacatcaacctcaaggtcaaggggcaggatggcaatgaggttttcttccgcatcaagagatccacacagctgaagaagctgatgaacgcttactgcgaccgtcagtctgtggatctcaactccactgctttcctttttgatggtcgtaggctccgtggtgagcagacccctgatgagcttgagatggaggaaggcgacgagatcgacgccatgcttcaccagaccggagggtgctttcctggcccttagaaggagcttgctgcagcctggctgttctatgtcgtatgctacctttagaactagagtaaaatgtaggaagtgaaagaacttgtgaggctatggttctgtgccatagcctgagggggggtctggaggtgaaacaacatcggagtactgttgatgtcgtgactg

SEQ ID NO: 6348 - DNA, 392 bp, Triticum aestivum
  Clone ID: LIB104-058-Q1-E1-G3
ggtcaggaaatcccgggtcgacggggccaagaaggagctggaggccaagtgccccaacacggtgtcctgcgccgacatcatctccctcgccacccgcgactccgtgaaactcgccggcggcccggactacgcggttcccacgggccgccgcgactcgctcgtctccaaccgcgaggagtccgacgacaacctgcccggcccggacatccccgtgccccaggtcacggccgacttcgtgaaggccggcttcaccgccgaggagatggtgctgctgctcgccggcggccacagcatcggcaaggtcaggtgcatcttcatcgagcccgacgcctcgcccatggaggcgggctatcacgccagcatcagcaagctctgcgacgggcccaaccggg

SEQ ID NO: 6349 - DNA, 412 bp, Triticum aestivum
  Clone ID: LIB104-058-Q1-E1-G5
aggtacaggtcaggaattcccgggtcgacgggcacctcatgagagattgttgtacacgctggtgctgactagccagcatcttctttgcttttattctggccggatttgttgaataaatacgcgaaacaaattaacaacgagtgtagcagtacatccaattgaaatgttttatgtggccttggcaaaaaaaaaaaaaaaaaaaaaaaaaaaaaaaaaaaaaaaaaaaaaaaaaaaaaaaaaaaaaaaaaaaaaaaaaaacaaaaaaaaaaaaaaaaaacggccaccacaaaggatccacccaaaacgtcaacatacaaacaacctcaagcccctctcaatagggcaaccaaaattcaaaaaaaaagggcgcccttaaaaaagttcctgtctggaaaccccttggggtaaccca

SEQ ID NO: 6350 - DNA, 402 bp, Triticum aestivum
  Clone ID: LIB104-058-Q1-E1-G6
aggtacaggtcaggaattcccgggtcgacgggacgtgggatgaaatgtgcatcttcctttctttatttttgtgtcatacctatgtaccgtgggactgaaaaatgttgtatcttcagcagaatggagacatcataaatattgatgtaaatgtgttccgaagtgtaagttcactctcctaggattgtggatatgcttatgtggtatgtttggcatacagtcggattttgctgacaaattgcttgcaaggctgataggtttattgagatgcctcatatgcaagctcataacccactgttaaagttgtctgttgtggagatgactgggttccatggctaatataacacattttacctgttatgtacttcatctgagctggatagcaaattgcattttaatgctgat

SEQ ID NO: 6351 - DNA, 464 bp, Triticum aestivum
  Clone ID: LIB104-058-Q1-E1-H11
ggtaccggtctagaattcccgggtcgacgggtacacccactgcaaagctgttggtccgggcaggtgcgcgctgaaccacggcgggtgctgggcggagaccaagggggagcgcaccttctccgcctgctcggacacggcgctgagcgggtgccggtgcccgccggggttccaaggcgacggccacaaatgcgaagacctggacgagtgcaaggataagctggcgtgcacctgcccggactgccactgcaacaacacctggggcagctacgagtgcggctgcaggggcaaccaggtgtacatccgcggggaggacgtctgcgtggccaacagcatgtccaggttcggctggctcgtcgccctcctcgccgtctcctgcgccgccggcctaggggtcgccggcttcatcttctacaagtacaggctcaggtcgtacatggactcggagatcatggccatcatgtccc

SEQ ID NO: 6352 - DNA, 448 bp, Triticum aestivum
  unsure at all n locations
  Clone ID: LIB104-058-Q1-E1-H5
ggtacaggtcaggaattcccgggccgacgggctagttctcatattcctgtgtggcagaccaaattggtgtggaagccagaaatgcagtacacgtaggagatgatgaaactgcagacaaggcgggtgctaacgctattggactcaagtgctggtatgcaattttctttcatacattgtggtttcttccccgtgcagacatcgtgtttcaatagtatcgggtattattaatttatcgggacaaaaagcgaaggaaaaaaaacattattgaatatctggttcggtggctgaccggctggctaactgattgttactgatgttgtccatttttaggctgtggggagaagatgtgaagaaattttctgagatacagcaccagatcgtagcaaaaggctcacgatgagtgcagggcaatgtctctgtntgcctgatttgttcatttgattgcaaa

SEQ ID NO: 6353 - DNA, 435 bp, Triticum aestivum
  Clone ID: LIB104-058-Q1-E1-H6
aattcccgggtcgacgggatatgaatcaatctgggtagtagctgattcgcttgaccaaagtggctcactttatcccagtgaaagccacctatacaagtgcgaagttggccatgatatatatgaccaggatcgtatgtctgcatggagttccgaggaccatcgtatcagacagaggaacacagtttacctcaaagttttggaatcagctgcaccagactttgggtactaggctagagttcagtacagcctttcatccgcagacagatggatagaccgagggagtcaatcagatcctgaaggacatgttgagagcgtgtgcgctagattatggatctagtagggatgataatctactttacgcagagttctcatacaagaacagttaccaagccagtttgaagatgaccccttttgagcctttgtatgggagaagga

SEQ ID NO: 6354 - DNA, 450 bp, Triticum aestivum
  Clone ID: LIB104-058-Q1-E1-H7
ggtacaggtcaggaattcccgggccgacgggtatatgatatacatgttattgatgtgtaccttactaatgctcgcagtagcacctgggtatttgatactggttctgttgctaatatttgcaactcaaaacatgggctacggattaagcgaggattggctaaggacgaggtgacgatgcacgtgggaaatggttccaaagtcgatgtgatggtggtcggcacgctacctctacatctaccttcgggattagttttagacctaaataattgttatttggtgccagcgttgagcatgaacattatatctagatcttgtttgatgcaagacagttattcatttaaatcagagaataatggttgttctacttatatgagtaatatattttatggtcatgcacccttgaagagtggtctatttttgttgaatctcgatagtagtgatacacatatt

SEQ ID NO: 6355 - DNA, 442 bp, Triticum aestivum
  Clone ID: LIB104-058-Q1-E1-H9
gtctagaattaccgggtcgacgggagcgattatgtgtggacatacacagatgactgaggaaattactagagctcctgttgctgatggtatgtccaaagatacaatcctaacaaacttctgagtttcactagaacacgtatcttgcccttttggctgttgtacacctaccagcacactctagtggctcttgtttacagcaaatgtgatgcgacttagggtcgtgaaagagatactgccacgtactaacagattacggcaatccattttccctcatgctgcatgttgcgcatcaaccattgcatgttgatatcctgatatattaatctcaatgacagaacaaaatgcttggtggtgccctgatacatcattcgcctgcaaggtgatgatgcactcgaaaagcccctttctagaaaagtataacggggctcaatatgggacattg

SEQ ID NO: 6356 - DNA, 300 bp, Triticum aestivum
  Clone ID: LIB104-059-Q1-E1-A9
aattcccgcgtcgacgggcggtaatagctctccggcatgacgatgtgcatcctcaactgcgacaagaacctgaccccgatgtgcaacaagatcttccacctggggacctgcatctgagacgtacccttgcatgcaggcgatcgctcatgggaatgccagcgctggcacatgcaacagcaccgatatgcacagaattgagtttgccattctgttctaaccaggatcattgcccacaaatctagaatgccatcatgaccggatccttttacgactttttcccgggcctgccctttgttgagt

SEQ ID NO: 6357 - DNA, 379 bp, Triticum aestivum
  Clone ID: LIB104-059-Q1-E1-C4
tgttgttgatgttgttgttgttgtcgttgttgttgttgttgttgttgttgttgttgttgttgttgttgttgttgttgttgttgttgttgttgttgttgttgttgttgttgttgttgttgttgttgttgttgttgttgttgttgttgttgttgttgttgttgttgttgttgttactgttgctgtcgctgttgctgtcgctgttgctatcgctgttgctgttactgttgctgttgttgttgttgttgttgttgttgttgttgttgttgttgttgttgttgttgttgttgttgttgttgttgttgttgttgttgttgttgttgttgttgttgttgttgttgttgttgttgctgttgttgttgctgttgttgttgttgttgtt

SEQ ID NO: 6358 - DNA, 109 bp, Triticum aestivum
  Clone ID: LIB104-059-Q1-E1-D4
aagtactaacatgttgcgacatcaagtttggttgctatataggttccagtcatatatatacgtgtatgcgacttcattactctacgagtgtgtcacctagaatcactta

SEQ ID NO: 6359 - DNA, 491 bp, Triticum aestivum
  unsure at all n locations
  Clone ID: LIB104-059-Q1-E1-H3
ggtccggaattctcgggtggacgggcaaatgaagaaaacatttatcttcaatacatttgtattttgccagatcttcaacgagttcaatgcgcgtaagcctgaggaaaggaatgtcttcaaaggagtaacaaagaatcagctcttcatgggaatagtttgtgtaactaccgtgtttcagatactaatagttgaattcctgggaaagttctttaaaattgtgagacttaactggagtctatggttagtttcagttgccattggcgtcgtaagctggcctttggcttatctagggaaattcattccagttcctgtaagacctctccaggcctatttcaagccttgttggaaatcatcacgccgagacgaagacgaaggcaggcagggctaaaaaggctgcagatcanctagtgtaaatagacacgggtcagccgaagaacaggaacccgttacgcctctcccagtggaacagagctgccgattacctctactac

SEQ ID NO: 6360 - DNA, 405 bp, Triticum aestivum
  Clone ID: LIB104-060-Q1-E1-A8
cgacgggcatcaacggaagtggtcccgattattgtcacttcggggttgccggatcataacacatagtaggtgactatagacttgcaagataggatcaagaactctcatatattcatgaaaacataataggttcagatctgaaatcatggcactcgggccctagtgacaagcattaagcatagcaaagtcatagcaacatcaatctcagaacatagtggatactagggatcaaaccctaacaaaactaactcgattacatgataaatctcatccaacccattaccatccagcaagcctacaatggaattactcacgcacgacagtgagcatcatgaaattggtgatggaggatggttgatgatgacgatggcgacagattcccctctccgaagccccgaacggact

SEQ ID NO: 6361 - DNA, 409 bp, Triticum aestivum
  Clone ID: LIB104-060-Q1-E1-B10
caggttacggtagggaattccggggtcgacggggtgaattctcgacccacaaatcactgtgagttgtgagagcttgtgatctgcctttgtaccgaaggaacattcctctgtcgccatagatccggtaggattgcctctcgcttcttcggaaatgaaattcgtgcgcagatcatcgccgatgagatcagtgatccacactggatgctgttcttgtgtatggattttatggaggtttgggtttttttcaaaaaaaaaaaaaaaaaaaaaaaaaaaaaaaaaaaaaaaaaaaaaaaaaaaaaaaaaaaaaaaaaaaaaaaaaattaaaaaaaaaaaaaaaaaaaaaaaaaaaagacggggctacccaataggatcaaagttaactttgccgggaagggaatgtcacacccct

SEQ ID NO: 6362 - DNA, 286 bp, Triticum aestivum
  Clone ID: LIB104-060-Q1-E1-B11
cgacggaggaggaaagtgatcagataatttttaggctgcaggtgttggtgagatgagctgttgtgtgttatgaataacaaacagattaaacaaacccagaatgacagtggcaagattactttaaaaaaaaaaaaaaaagaaaaaaaaaaaaaaaaaaaaaaaaaaaaggaaaaagaagaaacaaaacaaaaaaaaaaaagcggccgctctaaaggatcaaagcttacgtacccgtgcatgcaacgtcaaagctcatcgatagtgtcaccaaaattcaattcacaga

SEQ ID NO: 6363 - DNA, 388 bp, Triticum aestivum
  Clone ID: LIB104-060-Q1-E1-B6
cgacgggggaggatacgaggaatgatgagacgaggaaggacgatattaagatgcataaggaggatcagacggaggagactaacgatgacaccacggagattaagccggagaacattaaggacacgactactgagaagaccactaccaagactaatctgcttatcaatgatgataacaataataatattcactacgatgaacatgcacatcgaggaggatatttatgactgacgacatgacgatggaggatattccgatgatctcccctctccctcctctctcccctttcgcggccgctctatacgctccacccttacttacccgtccatccgacttcatacctcttctatattgctcccctccttcacttcactggccgtcctttttc

SEQ ID NO: 6364 - DNA, 410 bp, Triticum aestivum
  Clone ID: LIB104-060-Q1-E1-B7
aggtaacggtacggagttccggcgtcgacgggctaccagccgccgttgaaacgaggcgagcatcgagggaaccatggagaacgtcggggaagcgatgtcgcgccatctggcctcctcttgcggtgggagaacgaatactcctgtggctctggctggctctgcaccctcatgaacggcacaccatactcgatcgattcgttatcctctgggtgcttgaccttcgacctgtacgccccccacctccgcctgactatcgcctcgggtgaatctgtctgctccatcgcccataggagatactcgatgaactcggaggactgcaacgtgactgccgccgaggagtacatgtacatcacccgtcctcatcgccgccatctcgctctttcgcatacattgccacatggcccgcaccg

SEQ ID NO: 6365 - DNA, 408 bp, Triticum aestivum
  Clone ID: LIB104-060-Q1-E1-C10
gaattccggggtcgacgggtaatcaatttatgttatccagaacaaaaatacttcacacacttttgtgttttgtctaattgcaggtgtatgagacatttgtacaattcacatatgaagataaggaagaaagatatgtttatttgctgtccaaaaagttctctcatgtcacttttggcccaagagaagatagagtccaagtctctcacgttctggattcagattcggactgcacagacacacctgactcaaaatgcacacaagtttttcatacggactccgaattgggtgattttttttttgttggaaactagatttcgtgcactttccaacccaattggaatcaccttcaaattcgtccggagcgttgagttgtggacgaaacaatctgatgctgcagcaaaatccgag

SEQ ID NO: 6366 - DNA, 423 bp, Triticum aestivum
  Clone ID: LIB104-060-Q1-E1-C12
caggtaacggtacggaattcccgcgtcgacgggatcaacatcatcctacgcctcccacggattgataaaccttaggtcatccacttgacggaaatttgctattgtcctacagacctctgcacttgggggcccatcaacgtctacaagattaacgttgtgtactacacatcaagcaatttctggcaccattgccggggaagttagtgcttgaaggtatatctttacatcgtgcactcgaatctttgagtttcttgttttatcaccagtttagtcaataattcaactataaaatacggcactaagggtgcctcttatgcttcatcttttactatcgttcatgaagatcatgattccaataattgtgccaaagtgttatcagaagactgcattaacatgtttggaactaaatctttgaatgatgag

SEQ ID NO: 6367 - DNA, 117 bp, Triticum aestivum
  Clone ID: LIB104-060-Q1-E1-C2
tctcatctttgccccgaaacaaaaaaaaacgtaccagtcgatctagatgatgaaaactaatctaggaatccatgccacctgatagctcttcgatacctcccgtatgtcaattcaata

SEQ ID NO: 6368 - DNA, 429 bp, Triticum aestivum
  Clone ID: LIB104-060-Q1-E1-C6
caggttacggtacggaattcccgggtcgacgggatacttatgtcggatgcgattcctcatgtaatagctataacatagggtgacacagaactagctccagttcatcaatataatgtaggcatgtattccgaatatagtcatacgtgcttatgaaaaagaacttgcatgacatgttttgtcctaccctcccgtggcagcggggtcctattggaaactaagggatattaaggcctccttttaatagagtaccggaccaaagcattaacacttagtgaatacatgaactcctcaaactacggtcatcaccgagagtggtcccgattattgtcaattcggggttgtcggatcataacacataataggtaactatagacttgcaagataggatcaagaactcacatatattcatgaaaacataataagtttaga

SEQ ID NO: 6369 - DNA, 399 bp, Triticum aestivum
  Clone ID: LIB104-060-Q1-E1-D1
cggtagggaattcccggctcgacgggggaacagcgatatcgcgccatcgaacctgtcggcaaagctgatcacgaagcggctgtactcggaggatgcggcgtggaagaactgggtgtggcactctgagggggacctgatgctcaacaactccgtcttcgccgacagctgtggccccaaccagaggaagttcgataaggatgacctcatcccgcccaagccgggatcgtacgtcaccaggctcacgcgcttcgccggctgcatgccgtgcaagccctgcaagccctgctaaaccttggtggccccgccggccggccggagccgatcccttccgaatcttcaattctatagctttgttcaattcttttactcaaagattcgtgtatgtattactacgacatt

SEQ ID NO: 6370 - DNA, 407 bp, Triticum aestivum
  Clone ID: LIB104-060-Q1-E1-D10
gaattccggggtcgacggggagaaaggcattggagatggaacggtcagctatggaatggatgatgctgatgacatatacatgcggtcatggattggcatcattattggccctcacattactgtccatgagggtcgcatctaccagctgaagctgttctgtgacaaggactaccctgagaaggcaccatctgttacattccattcaaaaatcaacatggtttgtgttactcacgagactggggcggttgactcaattaagttcagtttgctaacaaactggcaaccgtattacactatggaacatgtcttgacccagctgatgaacgatattgcagcgacgcagaaccgcaagctagtgcagcctccagaagggacattcttctagcggggtgtttgccggcccatct

SEQ ID NO: 6371 - DNA, 425 bp, Triticum aestivum
  Clone ID: LIB104-060-Q1-E1-D12
aggttacggtacggaattcccgcgtcgacgggtttggactccttttgatatccttttccttcgaaacactgaaataggcaaaaaaacagcaatttgggctgggcctccggttaataggttagtcccaaaaataatataaaagtgtataataaagcccattaaacatccaaaacagaatatataatagcatggaacaatcaaaaattatagatacgttggagacgtatcaatgttcaccatcctctcctattttcgtggtcaactgagtcttgatcttggaggtttatttatgttggattgaatattttggatttgagatcacttgatgcatgtctaatttgtggatatccgtggtgacattgaggtaatctaggtgacaaaagaattgaacgatatgtattatatggtattgtcgtagtacgatt

SEQ ID NO: 6372 - DNA, 329 bp, Triticum aestivum
  Clone ID: LIB104-060-Q1-E1-D6
tcgacgggagactaaggtcagatcccatctgcatcgtccagtcttggacagtcgtcgcagctaatccagacagggacaatgaactcaggtggccatattgtgctatgcttcacgatatatctggccgtcatgaggaaattcttttgcatccacttttttttgactttctcagcaatgccgtttgtcacactctggttgatattacagtgtgacctgtgtgttaagaagggatgtttgtcgcatctatagcttccggaaccagctgctgtacattctttcatatgtcgttgaccaatctgctcaccgcagtttgccatttacaaatcata

SEQ ID NO: 6373 - DNA, 400 bp, Triticum aestivum
  Clone ID: LIB104-060-Q1-E1-E11
gaattccggcgtcgacggggcacaactggccggaggacctagtgttatagtttcctttttagcaaggttagtcattcttccatgaggaaattgtaagacttactatataagttgttcctgatgaatcctttgagtagccaaagtccgaccttgctcgaaaaccatgtcaatgctacctcgaagcatgtttgtggtactccgatgatcaatagttacatttgaagcataacgcaaaatgttctttactaattaccccaaacaccgtttgtatgggtaatgacatgatatttctctcacctttcctaaagggttttctacgttataccttgtcgtagagataatgttctgcttgtccttgggaaggatatacccctgaaatatgtgtttaaacacattttcc

SEQ ID NO: 6374 - DNA, 398 bp, Triticum aestivum
  Clone ID: LIB104-060-Q1-E1-F8
caggttacggcacggaattccggggtcgacgggggagaggaaacactgctaatgtcatccgttacttcccaactcaggctttgaactttgctttcaaggattacttcaagaggatgttcaactttaagaaggacaaggatggttactggaagtggttcggtggcaaccttgcttctggtggtgccgctggtgcttcctcgctgttctttgtgtactcccttgactatgctaggacaaggctggccaatgacgcaaaggcatccaagggtggaggtgaaaggcaattcaatggcctggttgatgtctaccgcaagactctcaagtcagatggtattgctgggctttaccgtggattcaacatctcctgtgttggaatcattgtctaccgtggtctgtac

SEQ ID NO: 6375 - DNA, 427 bp, Triticum aestivum
  Clone ID: LIB104-060-Q1-E1-G11
aggtaccggaatggaattccggggtcgacgggaggtcattgcttgtgcctaaccaactgttatttcttctacagagtgtatgtataatctcacaaacggactgtacaaacagcttctcagcacgaaccacaccagtaagcacacaagtccaactgatcatatttatataaaaacactataatcggctgaaaatgacaccatgcatgcacgaatcctggtttttattttatcacttattaaaaacatgtagtactcctagtaacccatgatttggaccagtctatggatctcaggaggaatttaattggttaacaacagaacataggaccaaagaccaccagaaaataatgcaaagcgacattaacgacagagacagtagtgcatgccctaatagtatttttttttgcatgcaaatcagctgggcccc

SEQ ID NO: 6376 - DNA, 393 bp, Triticum aestivum
  unsure at all n locations
  Clone ID: LIB104-061-Q1-E1-A12
cgggtcgaccgggaggttgagaagctgattggcaggatagtgaagtggctgaagcccggtgggcatattttcatcagggagtcctgcttccaccagtctggggattccaagaggaaagtgaacccgacgcactaccgggagccaaggttttacaccaaggtgtttaaggaatgccactcctatgaccaagatgggaattcctttgagctttctctggtaacttccaagtgcattggagcttatgtgaagagcanaaaaaccagaaccagatatgttggctatgggagaaggtcaagtgcacagaagacaaaggctttcagagattcctggacaatgtgcagtacaaatccactggaatcctgcgttatgagcgcgtgtttggggaaggttatg

SEQ ID NO: 6377 - DNA, 221 bp, Triticum aestivum
  Clone ID: LIB104-061-Q1-E1-E5
gacgggatataactgataatatcgatataggttattctacaagattactctataaaaaaaaaaaaaaaaaaaaaaaaaaaaaaaaaaaaaaaaaaaaaaaaaaaaaaaagaaaaaaaaaaaaaaaaaaaaaaaaaaaaaagcggccgcccaaaaggatccaagcttacttacccgtgcatgcaacgtcaaagctcttcaaaattgtcaccaaaattcaatt

SEQ ID NO: 6378 - DNA, 436 bp, Triticum aestivum
  unsure at all n locations
  Clone ID: LIB104-061-Q1-E1-F1
tcccggctcgacgggagattacccgaccccgctgcgttcgtcaaaccaaaggcccctgacggcacgcctgagatcaggcctcttgacatgccaaagcgccctcgtcgcaaccgcaggtcgccagctcttagggctgcattccaggagacaaccatctcgcccgctaatttggtgctcccattgttcatccatgaaggggaagaggatgctccaattggcgctatgcccgggtgctttaggcttggatggcaacatgggcttcttgatgaggtgtataaggcacgtgatgttggtgttaacagctttgtgctctttccaaaagttccggatgcattgaagtctccaacaggagttgaagcatacaatgacaatggtttggttccacngacaattcgcctgctcaaagataagttccctgatatcattgtctacacgg

SEQ ID NO: 6379 - DNA, 391 bp, Triticum aestivum
  Clone ID: LIB104-061-Q1-E1-H1
cccgggtcgacggggatctacggtgataggatcacgacgagaacgactacttcaaccctgttcttttgaacgcttccgctcgcgatctacaaagtggtatgtagatgcatctcccatgactcgttgcttagatgaactcatagatggatcttggtgaaaccgtagaattttttttaattttctgcaacattccccaacagcttaacccccacatggtcaacacggatcatgacgcatgtgttgtgtgaccatgatagctatttccctagcaagctatatatatatatattctccactagttccattcagtatgtggacatgaattgaatcaatgatgcaccctcctgaccactgaagctaagaataggagcagaagttagagcgagaaaga

SEQ ID NO: 6380 - DNA, 443 bp, Triticum aestivum
  Clone ID: LIB104-061-Q1-E1-H2
gaattccggggtcgatgatacagaaggaagaactgcagctagcattattcataactcctagcgggcaaaatctttttattgacagggtttttgatttgtttgatgaaaagaagaatggagtaatagagtttgatgagtttattcatgctctcagtgtcttccatccatgttcacctgtggaggataagattaattttgcatttaagctgtatgatttgaggcaaaccggatttattgagcgtgaagaggttatgcaaatggttattgccattttgaatgaatctgatatgaaattgtctgacgagcttcttgaggccatcatagataagggacatcacaacatcttttcctagttttgtcttcaacacggcagttgaagactaaatagtgcaagaattctaaaatgacggcaacaagttggaagcatattatgtctgtcagct

SEQ ID NO: 6381 - DNA, 439 bp, Triticum aestivum
  Clone ID: LIB104-061-Q1-E1-H7
gaattccggggtcgacggggaatgcggttacattgctgctaatctttatgccaagagtgtgttcggagaagatgctttggtgaacatcagcattgagaagcaagtcgatggcaagcttagtggttacatcagaataaggagtaagacacaaggaatcgcgctcagcttgggagataagattaccctcaagcagaagggaggcagttaattctgatgttgcctgctcacaaacaccggattgtatgacatgtttccttcaagagatccacttgccagtgtcatactacaggcacaatgggattgattgaattaactacaggaagtttttgtgtacagaatatcaaagagaagaatgataaaagaagaggatcgtagggaagtcagtcttgggagctgaaaaacgatcttgacacttcctttcgcgataggtgtttattga

SEQ ID NO: 6382 - DNA, 138 bp, Triticum aestivum
  Clone ID: LIB104-062-Q1-E1-A12
tagtgagtcgtattagatgctccaggcatctgtgggcgggttcgtctcttccagctgcgtctcttgcgttgattgacttgcattcctgagtctgtgtgctctgtggtcgggctagggagatacccggcgttcccgctc

SEQ ID NO: 6383 - DNA, 409 bp, Triticum aestivum
  Clone ID: LIB104-062-Q1-E1-A7
ggtacaggtctagaattcccgggccgacgggacaacaaatccccacatggtacctgctcgtcctcatgtctgcatatatacctccccatttttactcaagcagaagcatcggcttctactagttggaacagtctaccgcacatttaaatatgtgggcaatgaagaaaaaggggaaatatttctgagagacagtagatgatcatcaaaagaatgtgaaatgtataagagaattagaggcaccgggaagaactgcatcgttgctatgtagaccatgcatcaagctcaattttatcattcacaatggactccctttacctgccactagtgtcattcttttttttcggaaaaacttccaatctattcatcttcaatcatggcagtacaacgaatgccagaaataaaaattaca

SEQ ID NO: 6384 - DNA, 428 bp, Triticum aestivum
  unsure at all n locations
  Clone ID: LIB104-062-Q1-E1-B10
aggtacaggtcaggaattccngggccgacgggggctactgagcgaggcacggagacacaattgagatgaaccaattgacagattgcgatcagattgagttatcacccttctactgtcattgttgggtggggggaagggggagggagagaaaggcgtatcgagagtgtgcgcagtaggcatagaggcacaactagcgactgtgtgtgtatgtgtgtgtgtgtttgaaagaggagtagatagattactatcaagatcgaggtgccaccctactccttcggtgtcaggtaatgtgtgtgtgtttgagagagaagccatgtcgatagattagtatcaagatcgaggtgtcgccctactccttcggtgttgggaagtgtgtgtgtgtggttgtgtgtgtcggggggaagggggcagtgacacttacatatctc

SEQ ID NO: 6385 - DNA, 291 bp, Triticum aestivum
  Clone ID: LIB104-062-Q1-E1-B11
gaattcccgggtcgacggggaatgaatgataatatcgatataggttattctacaagattactctatagatccatcagctctaagtaaactgcgtataaatcatgtatgtataaggtatgtgttactgatgttagaagttgattcaaaaaaaaaaaaaaaaaaaaaaaaaaaaaagaaaaaacaaaagaatataaaaaaaaaataaacgtgtaaacaaaagaatatatctttacaatcgtgtctaaaagtcacatcacagtgcgtctctttaaaaaacattgagtgtgaaaa

SEQ ID NO: 6386 - DNA, 343 bp, Triticum aestivum
  Clone ID: LIB104-062-Q1-E1-B3
tgcttcaatttcagtttggttcagagtcaggtcctggatgttgtcaagtttgtttacttatgggcacttgtgtattggtttattgctgggcattatgccttgatattaaagatttccgcccagtacaaaaaaaaaaaaaaaaaaaaaaaaaaaaaaaaaaaaaaaaaaaaaaaaaaaaaaaaaaaaaaaaaaaaaaaggcaaaaaaacaaaacaaaaaaaaaaaaaaaaagcggcggcccaaaaggatccaagcttacttacccttgcatgcaacttaaaagctcttcaaaagtgtccccaaaatcaaattcaagggccgtcttttaaaaacttcttaactgg

SEQ ID NO: 6387 - DNA, 466 bp, Triticum aestivum
  unsure at all n locations
  Clone ID: LIB104-062-Q1-E1-B4
ggtctagaaatcncgggtcgaccggatacagtaggtttaacgccaatataaataaagaatgagttcattacagtaccttatgtggtggttttgctttctttcactaatggagcttatgagatttcctgttgagttttctgttgtgaagttttcaagttttgggtaaagatttgatgcactatggaataaggagtggcaagagcctaagcttggggattcccatggcacccgaagatattcaagagtacacaaaagcctaagcttggagatgcccccggaaggcatcccctctttcgtcttcgttcattggtaactttacttggagctatatttttattcgccacatgatatgtgttttgcttggagcgtcgtgtatgatattagtatttgatgtttagttttccacaatcgtactttctgtacacaccttttgggagaagacacttgattgaaatttattagaata

SEQ ID NO: 6388 - DNA, 371 bp, Triticum aestivum
  Clone ID: LIB104-062-Q1-E1-B6
caggtaccagtctagaattcccgggccgacgggatggcttaaaaggaagcgctgccagggaaacaacccggaagttttagagagtcatttatttctgttgtctgcttttatatagtttaaaaacaaaaaaataaggaggggaacccaaaactttttcaaaaagaaaagtgaaagtgagatagacgagcattgtgaaagtgggggacgtccttgaactttgttcatgcccatggaaactttgtgaatcttaattacagaaacttttcaaaaaaaataattatccccttgtacaattccattgtattataaaaataatgtgccaaggtttgcctttaggatgtttacaatgcttgttgggttgtgccggtgta

SEQ ID NO: 6389 - DNA, 427 bp, Triticum aestivum
  unsure at all n locations
  Clone ID: LIB104-062-Q1-E1-B7
ccgggccgacgggtggcggtaaacctgcccaggagctgcaagacaaggagcaggcccgagtgccggatgatgcggcggcaaaggtctgagccaagcaagcagtgatcggcgatgggacagaaaagattgtgtcaggacatactactggttccagactgtgttggaatgcaacgcatgcaccgtgaactggcggcaggccaggacgataagatgggcagtgcgccattgctgtacccactttctgcctgatggtttcctttcaagtagctagtaccagacgtctcccgttgatgttgtatgtaccgaattaataaaacaagtttcagatgcttttagtgagctcctatgtgggtggcttcagcacgcaccanagcacaattttacatttaaataaaaaaaagcggccgctctacaggatccaagctta

SEQ ID NO: 6390 - DNA, 340 bp, Triticum aestivum
  Clone ID: LIB104-062-Q1-E1-B8
gtaccagtcaggaattccggtcgacgggagaggccaggagatgatcaggaagcgtcaaggacgaccaacgttcgcaaggtcgacgtaacggacgaacccgtgcaaacgacctgaaccggaatgcccgatcgatttcgcccaggacgacgacctcgccgtcgacgacttcaaggaggcggacgatcaacacgatccacgcttacctacgcatccacagcgacatgatacctctgcaaagttgccaccgtggatcaactcatcggccgtcgtcttcacgtgtcggcacagagaatcccccgtcgtgtgccaacttactcccctatcatcacatcctcctggc

SEQ ID NO: 6391 - DNA, 409 bp, Triticum aestivum
  Clone ID: LIB104-062-Q1-E1-B9
cccgggtcgacgggaggaggccataggagccacgaggaggccacaagccaggaggacgcaccctaggaggggcacctccagggcttattggccccctggagcacctccaaccctaatctctgatctattgatttggtttggccacctagattgatttttcttagaatgagagaggtgccttgttttaggttcaatcttgcggtgtcctcacccaatgacagaagggtagcgaggcatgcatttgtattgttgccattaaggataaaaagatgggttttttgcaatattgattggatctatctccctacatcatgtcatcttggttaaggcgttactccgttcttgttaacttaatacactagatgcatgctggatagcggtcgatgtgtggagtaatagtagtagatgc

SEQ ID NO: 6392 - DNA, 463 bp, Triticum aestivum
  Clone ID: LIB104-062-Q1-E1-C10
ggtacaggtcaggaattcccgggccgacgggtaaaattatactctagtgcttcacttatatcttttagagcatggtggtggatttgttttatagaaactattgatctctcatgcttcacttatattattttgagagtcttaaatagcatggtaattttcttagaatcctaatatgcttggtatgcaagattaataataaaaatcctcttatgagtgtgttcaatactatgataagtttgatacttgataattgttttgagacatggagatggtgatattaaagtcatgctagttgagtagttgtaatttgagaaatacttgtgttgaagcttgtgattcccgtagcatgcacgtatggtgaaccgttatgtgatgaagtcggagcatgatttatttattgattgtcttccttatgaatggcggtcggggacgagcgatggtcttttcctacaaatctatcccc

SEQ ID NO: 6393 - DNA, 417 bp, Triticum aestivum
  Clone ID: LIB104-062-Q1-E1-D12
ggtacaggtcaggaatgcccgggccgacgggatacatcaattttgaaaaaaaaatcatcggttttgaaaagagttcattgattttgaaaaacagttcatcgattttgaaaagagtttttcaattttgaaaagagttcatcgattccgaaaagagttcatcgattttgagaaacaaagttcatcaattttgaaaaagagttcatcgatttgaaaaatagttcattgattttgaaaaaagttcgtcgatttttaaaaaagttcatcgattttgaaaaaaagttcgtcgatttggagaaaaaaatatttcttttgtaaaagagttcatcaattttgaaaaaatagttcacgaattttaaaaggttcattggattttgataaaaaaaaattcagcaaattgaaagagttcacgtatttaac

SEQ ID NO: 6394 - DNA, 450 bp, Triticum aestivum
  Clone ID: LIB104-062-Q1-E1-D6
ggtaccagtcaggaatgcccgggccgacgggatcataaaaagccttgcaagcaaagtgactaatgagttagttgcaagatgatgtattacggaatgagtaaagagacttgtcagtaatgagattgaactaggtatgaagatactgtgacaccctcgattcaatcatacactaaccatacacgcaaatgtgtacgatcaagatcaaggactcacgggaagatatcacaacacaactctagacacaaaataaaataatacaagctttatattacaatccaggggcctcgagggctcgaatacataagctcgaatacacaagagtcagcggaagcaacaatatctgagtacagacatgagttagacaagtttgccttaagaaggctagcacaaaagcaacaacgatcgaaaaggcaaggcctcctgcctgggagcctcctaactactcctggt

SEQ ID NO: 6395 - DNA, 435 bp, Triticum aestivum
  Clone ID: LIB104-062-Q1-E1-D7
aatgcccgggccgacgggttacagtaagaattgtgcaagtgtttggcgaggagtatttgagatctcccactgctgaagacaccgcaaggctattggcgatgaacaaagcgcgcgacttttctggcatgcttggctcaatagattgcatgcattggagttggaagaattgtccaaaggcatggcatgggcaattccacggccaaaaagagggttccactataatccttgaagcggtggccgattaggagacttggatttggcatgcattctttggaatgcctggatctttgactgacattaatgttgtcaaccggtcaccactgatgaataagattgcaaacggtgagtttccaccggtgcagtttgtagcaaatggtcgtacgtacaactatggctattatctagcggatggcatctatccaaaatggcaaacct

SEQ ID NO: 6396 - DNA, 447 bp, Triticum aestivum
  Clone ID: LIB104-062-Q1-E1-D8
ggtactagtcaggaattcccgggccgacgggtccatggaatgtactacctccgtatcaaaatagaatacatttttgtaggctaaactagcattcaacaacgttttactttttgctacggaggtaatatccgattatcagctcactcgtcagcgcgcaacgattttgatcatcccccctcttgcaacttgctaccgcatagtatatatagagatactgtacaagacaatatcacaaccgcctttcatggtgtgagtaaacgctttctcttctcttttatcaaaacattggacattcactcatgtccatttgtgtccccctctccccctctttgtttttctgtttttttggtggagagagtttcccgcctattgtgtttagagcaacgttcttacatctgcaacctccaaagcgtttttgttttggaggatgctctattctctttgttt

SEQ ID NO: 6397 - DNA, 337 bp, Triticum aestivum
  Clone ID: LIB104-062-Q1-E1-E12
aattcccgggccgacgggtccgataaagctatacacattcgcgtaggagtatgtgctttgttgtgggcaatttggaactgcagaaatgatttggcttttaacacaacagcaactattcattttttgcaggttttattccgagctactgcgctgatccgtatgtggtcgttactcactccggcggaggccagggagcgtttggttaccggatctgtccggtgggagatggtagctcgggatatcttcaactggtttgatggcggtcatgtaataggatatgtgattaatttacctatctttcttttgccagccggtggtggcttatgggcctttagtt

SEQ ID NO: 6398 - DNA, 455 bp, Triticum aestivum
  Clone ID: LIB104-062-Q1-E1-F11
aggtacaggtcaggaatgcccgggccgacggggaggttgagaagctgattggcaggatagtgaagtggctgaagcccggtgggcatattttcatcagggaatcgtgcttccaccagtctggggattccaagaggaaagtgaacccgacgcgctaccgggagccgaggttctacaccaaggtgtttaaggaatgccactcctatgaccaagaggggaattcctttgagctttctctggtaacttccaagtgcattggagcttatgtgaaaagcaagaagaaccagaaccagatatgttggctgtgggagaaggtcaagtgcacagaagacaaaggctttcagagattcctggacaatgtgcagtacaaatccactggaatcttgcgttatgagcgcgtgtttggggagggttatgttagcaccggtggattcgagaccacaaaggaatttgtggac

SEQ ID NO: 6399 - DNA, 458 bp, Triticum aestivum
  Clone ID: LIB104-062-Q1-E1-F6
aattcccgggccgacgggacacccaatagtccaggactccctcagtgggcatatcttttgtagaaagaattaaactctcttgcttcacttatatctatttagagagatgacaggaattggtcattcacgtggttagtcataaaatcctacataaacttatagatcgctgaatatgatatgtttgattccttgcaatagttttgcgatataaaggtggtaatattagagtcatgctagtgggtggttgtggattgtagagacacttgtgttgaggtttgcaagttccgtagcatgcacgtatggtaaccgttgtgtgacaaatttgaagcatggggtgtttctttgattgtcttccttatgagtggcggtcggggacaagcgatggtcttttcctaccaatctatccccctaggggcatgcgtagtattactttgttttgagggctaataagcttttgc

SEQ ID NO: 6400 - DNA, 385 bp, Triticum aestivum
  Clone ID: LIB104-062-Q1-E1-F7
ggtactagtctagaattcccgggtcgacggggatgatggcggagttgtcaatgttactccggaggaaatgagagccatgatcgaagttatagctgagacggggaagttctggcacgactggagttttctcaagagattgttgtctctccaattgatgcaggtcttgggtgaatattctgaggctcaaatggtgatccgagaggacgggcagcaacagaattccttgtttagagagacacactcagagctgtttagccagctcaatgatgctctcttgaggtttgaagagggtcctccgtttacacttcaaaggctttgtgagattttgttggattcaaaaggaacatacacaaaattgtcgaagcttgctttggccttggagaag

SEQ ID NO: 6401 - DNA, 395 bp, Triticum aestivum
  Clone ID: LIB104-062-Q1-E1-F8
aattcccgggtcgacgggatgcaggagttcttcgtccacttccacggacccaaagacagtatttaccagggtggtgtgtggaaggtgagggttgaactcacagaagcttacccctacaaatccccttccattggcttcaccaacaagatctatcaccccaatgtcgatgagatgtccggttctgtctgcttggatgtgatcaaccagacctggagcccaatgttcgaccttgtggatatctttgaggtgttcctgccccagcttctcctgtacccgaacccctcggaccccttgaacggcgaggcggcatcgctgatgatgcgcgacaagaatgcctatgaaaataaagtcaaagaatattgtgagagatatgccaagcctgaagacatatcccc

SEQ ID NO: 6402 - DNA, 456 bp, Triticum aestivum
  Clone ID: LIB104-062-Q1-E1-G9
aggtacaggtcaggaattcccgggccgacagaatgagccttcaggatggaaacacctcctgtcttgccacttgcagcacagctgacatcgacgatgatccatttagagcctcatattcgtatgatgctgaagaagacattggggatgaagagtctggtgccttcacttcttgtgttggaacacggtggtttagagctcctgaactcctatatgggtcaaccagctacggccaagagatcgacctgtggtcactaggatgcattttggctgagcttcttagtttagagcccatattcccaggccaatctgatattgaccagattggtagaatcatcggagtcctgggcaatatcacagaagagtcctttcctggctgttcaaatttacccgattacaacaagatctttttcagcaaggttgagaagcctacgggcctcgaagcatcacttcctaaca

SEQ ID NO: 6403 - DNA, 405 bp, Triticum aestivum
  Clone ID: LIB104-062-Q1-E1-H11
aggtacaggtctagaattcccgggtcgacggccttcctattttggtaggatttttacagttccataagcattcaagagttacagattgctgcaggctgttctgtttttgacagattctgtttttcatgtgttgtttgcttattctgatgcatttatggctagtatgtagggtatgaaccatagagaagttggaatacagtaggtttaacaccaatataaataaataatgagttcattacagtaccttatgtggtggtttttctttcttgcaccaatggagcttatgagatttcctgttgagttttgtgttgtaaagttttcaagttttgggtaaagatttgatggactatggaataaggagtggcaagagcctaaattggggatgcccaatggcacccaagatat

SEQ ID NO: 6404 - DNA, 447 bp, Triticum aestivum
  Clone ID: LIB104-062-Q1-E1-H7
aggtaccagtctagaattcccgggccgacgggcttcttagagcaatttgacacaaagaaaaaatgtcacggagattgttgctcggacaacttctcgggcgaggaatgcaacgcaaagagccaaatcggtggggtgtttgacgctcttcgtgtcactgatgacctgttgatgaggagggcatattttaggaagcagcagcttgacaacaaaacaacatcacctaactctaactgaagaggacagccggtgtgatttgctcttacattgatatcgcatgcgtatgaataatggtccaatggaattgggagcggagtaagaagctcatgttgcctttatgcatgtaataatcatgcctgcctgcatggcccgctagctgttggtccaatgcctggctgcctgcctgaactggcgtcaatttccagtttgtttttgtaatatataataact

SEQ ID NO: 6405 - DNA, 365 bp, Triticum aestivum
  Clone ID: LIB104-062-Q1-E1-H9
ggtacaggtctaggaattccgggccgacgggagagctaagagacagtactccgaaaatctcaaattgtaactgcaagtgtgaattacctctgctctgtttctgtgtgttgtactcctccaaagatcaaaaaaaaaaaaaaaaaaaaaaaaaaaaaaaaaaaaaaaaaaaaaaaaaaaaaaaaaaaaaaaaaaaaaaaaaaaaaacaaaaaaaaaaaaaaaaaaaacaaaaaaaaaagtaaaaaaaaatcaaataaaaagaaagaagaaaaaaaaatataagattgaaaaaaaaaaaaaaacaacgaaaaaaaaaacaaaatgcaacaaaaaaaaaatttagaaatcaaaaagtaatattaagaaa

SEQ ID NO: 6406 - DNA, 387 bp, Triticum aestivum
  unsure at all n locations
  Clone ID: LIB104-063-Q1-E1-A1
ggtaccggtcaggaattcncgggtcgacgggaggacaacatcgattcatctgttatatgatgcggtagctgaaccccttttcctctgcatgaactgtcattgccacagtccatagatgagacccactagcatgaatatgagttgtttgacccctgatgtgcctacgcaatcatgcgtgtatgtcatggctgctactgcttagagttgagtcaggtctgattcatcgaggatgaattgggaaagtggtaaacatgtcctactgggattgcgctcactgtgtaaacactagttggtagatgtatccatgagacgccatgtacgactacatggagggttgtttcattagcatcatccttaagcactaagatctgtatgtatgctttaaga

SEQ ID NO: 6407 - DNA, 461 bp, Triticum aestivum
  Clone ID: LIB104-063-Q1-E1-A10
ggtacaggtcaggaattcccgggtcgacctcctcaaccggaacaacaccttcaagcccttcgccgaatacaagtcggactacgtgtaccagcccttccccaagcccgtgtgggagcagatcttcggctggctcacgaagcccggtggggggatgatgatcatggacccatacggcgccaccatcagcgccacccccgaagcggcgacgccgttccctcaccgccagggcgttctcttcaacatccagtacgtcaactactggttcgccgaggcagccgccgccgcgccgctgcagtggagcaaggacatgtacaatttcatggagccgtacgtgagcaagaaccccaggcaggcgtacgccaaccacagggacattgacctcggcaggaacgaggtggtgaacgacatctcaacctatagcagcggcaaggtttggggcgagaagtacttcaagggcaact

SEQ ID NO: 6408 - DNA, 461 bp, Triticum aestivum
  Clone ID: LIB104-063-Q1-E1-A6
ggtacaggtctagaattcccgggtcgacgggcttcttagagcaatttgacacaaagaaaaaaatgtcacggagattgttgctcggacaacttctcgggcgaggaatgcaacgcaaagagccaaatcggtggggtgtttgacgctcttcgtgtcactgatgacctgttgatgaggagggcatattttaggaagcagcagcttgacaacaaaacaacatcacctaactctaactgaagaggacagccggtgtgatttgctcttacattgatatcgcatgcgtatgaataatggtccaatggaattgggagcggagtaagaagctcatgttgcctttatgcatgtaataatcatgcctgcctgcatggcccgctagctgttggtccaatgcctggctgcctgcctgaactggcgtcaatttccagtttgtttttgtaatatataataactcttctgtattgtgc

SEQ ID NO: 6409 - DNA, 460 bp, Triticum aestivum
  Clone ID: LIB104-063-Q1-E1-B10
ggtataggtcaggaagtcccgggtcgacggggaggttgagaagctgattggcaggatagtgaagtggctgaagcccggtgggcatattttcatcagggaatcgtgcttccaccagtctggggattccaagaggaaagtgaacccgacgcactaccgggagccgaggttctgcaccaaggtgtttaaggaatgccactcctatgaccaataggggaattcctttgagctttctctggtaacttccaagtgcattggagcttatgtgaaaagcaagaagaaccagaaccagatatgttggctgtgggagaaggtcaagtgcacagaagacaaatgctttcagatgttcctggacaatgtgcagtacaaatccactggaatcttgcgttatgagcgcgtgtttggggagggttatgttagcaccggtggattcgagaccacaaatgagtttgtggacaagctg

SEQ ID NO: 6410 - DNA, 437 bp, Triticum aestivum
  Clone ID: LIB104-063-Q1-E1-B11
ggtcaggaattcccgggccgacggggtcgtacaatggcaagttcagcttcgactgcttcacccacagaaaggcagtgctgatccgcgggttcggtggcgaggcgaacgcaaggtacccaccctacacggcagagaaacagaggatcttgaggggcctcatcaagggcagcttctttgcgctgatccttgcgctcctggggttcccaagggagaagcgttagctgagttgagttccctcccttctccagtacagcatagcaggattgttcatgttcatgagggtgatgtgcaggactggtgatgtggtgcacttctgcactgtgaagcgccagtgcgcgagtgtgttcaacaggtgtaaaatatgggactatcatcggatttctggatgtaatttaattttacataaataaacctggtttgctacttaaaaaagaaaa

SEQ ID NO: 6411 - DNA, 379 bp, Triticum aestivum
  Clone ID: LIB104-063-Q1-E1-B12
ggtataggtcaggaagtcccgggtcgacgggaaagggcactcggcggttcaagcggatctacaacgggtacgcattattgtctaacacggggaagagggccatgtacgattcctggctcgctgcttgcctatacgactacaaccaggatttctcgaacctcatgcatgagatgctgtcgatgatatataccgtgacgaacgattcgtcggacacgcttcaggacctggaaacaatgctgcatgagataatcaaaggcaaggggcgtagctgatccactgcttctgctagttctaccgcaaggagtcgtagaagttgcagtggtccagtgaatcgaaatgtaccagtatttgtcatgtcgcaccgtatccggaaccgtca

SEQ ID NO: 6412 - DNA, 447 bp, Triticum aestivum
  Clone ID: LIB104-063-Q1-E1-B2
cgggtcgacccatacaattgcaataatgtcatgacccgcatcatctcacttacacgcaatcgcaaaatggagttgactttcatggcgctgcactcggctatacaggccaatgtgtatgtcaaccttgatttcatatcttccaatgccactaggacgggcaccatctactatgtttatggtgaaatcaccgcacaccatcaactctataacggtcagagtgttttgctcttttctcgcggagaagagaacaaagcagaggtcattgatggtgaacttccactgttacggaagtgtgcagttgttcctatttacttggagccgctcctgatactcaagttcgacctgcatgttccaattaattgtgatcacgatgatggtggttgtaccatcgccttccgagactatgttacattttaccgttgacagtatgaagaataaataatctgc

SEQ ID NO: 6413 - DNA, 404 bp, Triticum aestivum
  Clone ID: LIB104-063-Q1-E1-B3
gggtcgacgggccaccttagataaaccattactttaacaatctcacatctgtcatggatttcactcacccaatccacgtctactagcatagcatggcataataagcaaacatagaagtaactcccaaaggtttgataataacaggtaataggtactacctcatctactttccaaacccacaatttaattagatcctaatcatgcaatgtgtgaggattgatgtaatgcaataaaactgggtagtaagacgtatgatcaaagtgttacttgccttgctgacgatccgtgaaacctaacgattcgaggtagcaagcggcgcactccgggtactctatcgcaaacaaacaagcacacaataagtactcaactaatgcacaggtaaaactcaaataagagatctaact

SEQ ID NO: 6414 - DNA, 474 bp, Triticum aestivum
  Clone ID: LIB104-063-Q1-E1-B6
ggtacaggtcaggaattcccgggtcgacgggatatgagtatcagagtagcatgtctggagaaaccacaccacctacagagttctgttgcccaatatcaacaaagctaatgcatgatcctgtgataataacatctggacagacttacgaaagagaatatattgagaaatggttcagtgagggatacaacacttgtcccaagacacaaaaaaagctagaaaactttgcgatgattccaaatacttgcatgagggatctcatttgcaactggtgcagagagcatggtttcacaatctcagattttcttccaagcaaagattcctacagttatttgccagagcaattgcatggtcactctatgtcaagtttgcacaatgtttcagtacctctaattgctgggaatgccaggaattttgtgattgatcacagcagttcatctgtcgcgttttctgatgccagttatgtctcagattcct

SEQ ID NO: 6415 - DNA, 320 bp, Triticum aestivum
  Clone ID: LIB104-063-Q1-E1-B8
aggtacaggtcaggaattcccgggtcgacgggcacattcacgactaacggttctaggatagagactgcctcaagtgccatctagttgcaagtgtcacactatgctcgcgaatgagaattcgatctatggagtgctccacagcaggtcgcaattttaggatctcttcatgaggagaggtaccttccacaacatcttcgaaggcactctcaccgctttcaagaccggcaggactattgcaaatgataatgctattgatttctcgagcccatttgctgacgtcattgagcaattttttggatgccacatgacaatcaaaccaa

SEQ ID NO: 6416 - DNA, 443 bp, Triticum aestivum
  unsure at all n locations
  Clone ID: LIB104-063-Q1-E1-B9
gtcaggagttcccgggtcgacgggcatataaaatttcctattgacttttgtgttgtgaacttttcatgttttgggtaaagcttttatggactatggaataaggagtggcaagagcctaagcttggggatgcccatggcaccccaagatattcaaggatagccaaaagcctaagcttggggatgccccaggaaggcatcccctcttttgtcttcgttcaatggtaactttacatgcagctatatttttattcaccacatgatatgtgttatgcttggagcgtcgtgtattatattattctttgccttttattttaccacaatcatccttgctgtacacaacttttgggagaagcctaattgattaatgtttgctagaacactctatgtgcttcatatatatcttttgagcttgatactttttgctcgantacttcacttatatc

SEQ ID NO: 6417 - DNA, 427 bp, Triticum aestivum
  unsure at all n locations
  Clone ID: LIB104-063-Q1-E1-C1
ggtctagaattaccgggccgacgggatagattatacctgcctcaaggagctttagtatctcctttcttaccacttctttcattttagggttcagccatcgtcgatgatcacaaactagtttagcatcttcttccaaattaattttatgttgacataaagtgggactaatgcccttaagatcatcaagagtatacccaataacaacacggtgcttcttcacagttttcaataatctctcttcctcatgctctaaaaggttagcactaataataacatggtatatctttttctcatcaaaataagcatatttaagagtatcaggcaacggtttaagctcaaacacgggatcacccttgggtggangaggatcccctaaggtttcaacaggcaaattgtgtttcagaataggttcctgtttaaagaatac

SEQ ID NO: 6418 - DNA, 420 bp, Triticum aestivum
  Clone ID: LIB104-063-Q1-E1-C10
aggtataggtcaggaagtcccgggtcgacaggctttggtcgtctcttgtacatggatgtagtagttatgatccttatgaactcatggttcatcagtgtaaagttcaggatatgtatgtccctgttcttgtagatttatacatattgttgtatagaaagaaagcaagactcggaaacgtgaactaaaaaaaaaaaaaaaaaaaaaaaaaaaaaaaaaaaaaaaaaaaaaaaaaaaaaaaaaaaaaaaaaaaaaaaaaaagaataaaagaagaagaaaacaataaagaaacatcaaaagcacttcgaataatgtcaacgaaattcgaattaattgaccgtcatttaaaagattagctaatgggaaaacgctgccgttacgcgaaacaacgagcggtgcaacaaagcctccttttacaagaag

SEQ ID NO: 6419 - DNA, 447 bp, Triticum aestivum
  Clone ID: LIB104-063-Q1-E1-C11
ggtcaggaattcccgggtcgacgtcggcgtcatggaggcagctctgcctcggcttcagctgctaagtccttgagggtgttgcggttgcggttgcattggacgacgacgtcagggtaccggctccggcgtgatggaggagggcggcggtggattgggcgcgacggcgatggagacaccgacgaggacgacgagctgccgtcgttcgacacccacatgaccatcctcggccactgagaggagccaagcctgacttctagcgcatggttgtagtatcttcttgcatttgcgttgcttgtgtagttgtgttgctgcccagaagaaacagtctggcaaaacataaaagaagaagaagaaagaaacagaatcaggaaagagatgagagagcgagcgtgtcacgatgatccccgctagctgatgacgaaatttgccggttgctcttgtttcttg

SEQ ID NO: 6420 - DNA, 323 bp, Triticum aestivum
  Clone ID: LIB104-063-Q1-E1-C12
gtcaggaagtcccgggtcgacggggtaccctaacgtgactcaaagaacctgtaccatagtggacgccgatcgaagtaactagatcttgcacctatcctgccatgcggtctcggcatccacgattttatatgtgtgtccccagtgaatttgcgtcaataggggaatatcttgctgtctgcacttcaggacagatcttgctaacgcccgctacatcgatgacattttcaaaggtcgactattgctggctgagccattcaaggtccgacttcgggagtcggacatggcaataatgttcctcatgctacacacatccacgctagacg

SEQ ID NO: 6421 - DNA, 446 bp, Triticum aestivum
  Clone ID: LIB104-063-Q1-E1-C3
gggtcgacgggggtgttattctagtatgaattctagggcagtttgtgacacttataggaatagcccaacggattgactggaaagaacactactaggaaaagggctatagatggaattgacactaatggcgcaccagacatgtggtgcaccattactatatactaatggcgcaccatgtgttggtgctccattagtgtgcaaatactaatggcgcaccacgtccacggtgcgccattagtaattttttttaattttttcaaaattactaatggcgcaccgtggacgtggtgcgccattagtatttgcacactaatggagcaccaacacatggtgcgccattagtatatagtaatggtgcaccacatgtctggtgcgccattagtgtcaattccatctatagcccttttcctagtagtgttctttccagtcaatccgttgggctattc

SEQ ID NO: 6422 - DNA, 466 bp, Triticum aestivum
  unsure at all n locations
  Clone ID: LIB104-063-Q1-E1-C4
ggtcaagaatacncgggtcgacgttagtgttgctgttggcacttccaagggtcttgtggtgccggttatccgagatgctgatacaatgaactttgctgacatcgagaaagggataaacaaccttgcaaagaaggctactgagggggcgctgtcaattgacgagatggcgggaggaacattcaccatctccaacggtggtgtctacggaagccttattagcacgcccatcatcaaccccccacagtcagcgattcttgggatgcactccatcgtgcaacgccccgtggtcgtggacggcagcatcctcgccaggcccatgatgtacctcgcgctgacataccaacacaggctgatcgacggcagagaagccgtctacttcctgcgccgcatcaaggacgtcgtcgaggacccccggaggctgctccttgacatataagccccatgcgcccgatctcctttgctgcca

SEQ ID NO: 6423 - DNA, 446 bp, Triticum aestivum
  Clone ID: LIB104-063-Q1-E1-C6
aggtacaggtcaggaattcccgggtcgacggggaagtccacatgttgctgtttgaaaacagaaagtttaccgctgttgcaataattccctagaaaagtcagaatgtgataaaatgtcgaaaccttttgtatattaagatctgataaatttactacagtgggaattttatttcataatttttggagctagggaagtatggatgttgcagtattctttacagactatcctgtttaggcagattgctgttatgtttgcattgtttgcatatgtttgcttctttaatgattcgatttgaggataggactattaaatatgcagaggcatttagtatgcaatgttgaataacaattttagtgatttgctacagtagagtatgataaggtttttgcaatagtttatactaacttatctcacgtgtcctggttgagttttgtgtggatgaagct

SEQ ID NO: 6424 - DNA, 89 bp, Triticum aestivum
  Clone ID: LIB104-063-Q1-E1-C7
aattcccgggccgacgggaaactcaaattgtagacgcatggttctacaaataggacgcatggaggtccggatccccaggttcaacaaag

SEQ ID NO: 6425 - DNA, 419 bp, Triticum aestivum
  Clone ID: LIB104-063-Q1-E1-D12
attcccgggtcgacggggacgtgtacgatgaccagccgatcgagtgcggcctggacagcctctacgatggctcggatgagcagctgctcgagcgcgcgatgatggaggcgagcgtccgctcggcgggagccgctgagggcggcgaggatgccggggtggacgtgaaggcggacgagttcatcgcaaagttctacgcgcagatgaagctgcaacggcaaatctcgtggctgcaatacaacgagatgatggaaaggagcgtctgctagaacaacagtgtcgtttgctcaatcttgagttttgattcatcgatgtcaattgcaagttagatacacataatgcataaaccgtagttgtcacatgtatatatgtgcatatatttctattgatttctcaatttctgaactttgtatgcaaagttg

SEQ ID NO: 6426 - DNA, 337 bp, Triticum aestivum
  Clone ID: LIB104-063-Q1-E1-D2
ggtcaagaattaccgggtcgacgggtctggtattatgaaacgcttcatcattggcatattggatgcatgatcatagacttgacatcgtatttgtcgcagagccatcggttcatagtcatcatacatgtcacgaatgcatcattgcacatcccggtacagcgcgggacgcattcacatagcagcacatgttgttctaactagtgcagttgtattcttgagttgtaaataaattaaagtgtggatgtcatcaatgatacagcattgtctcacgtgaagacagaatgatgaatactatgatttccccacaagtctggattcaactcccgttgatttacaa

SEQ ID NO: 6427 - DNA, 361 bp, Triticum aestivum
  Clone ID: LIB104-063-Q1-E1-D3
ggtcaagaattaccgggtcgacgggtgactatctgttgatcaacgagctagtcaactagaggcttactagggacacattgtggtctatgtattcacacatgtattacgatttccggataacacaattatagcatgaacaatagacaattatcatgaacaaagaaatataataataaccatttattattgcctctagggcatatttccaacatcttcatcccgcgccttccacagattgataaactttaggtcatccacttaagggaaatttgttactgtgctacaaaacgaggctcaacacgagtctaaaaaataagttgtatagtagacatcaagttctcttttggcgtcgtaaccgggg

SEQ ID NO: 6428 - DNA, 439 bp, Triticum aestivum
  Clone ID: LIB104-063-Q1-E1-D4
ggtcaagaattaccgggtcgacgggctctcgctatatcatgacagtcggttttcggctttctctactgaggtgctcgcctggccgaaccggggcacaatcgcagtagttctcctggtgccgcgttagccgatataacggaacgtaaggcagcaaaacacaggaaccgggcaaacccaacatttgaccaaagacatgatttggagctgatgcatataaggccaaactcgcgacgccgaacactccctaaggtattcggtctttatgaagacaggccgaaacagagcccttggtaaaaaagcccctggtgtccaggtacgcgcaaaattctggcgtggccacatgccaaaacgccagcctcctcctcggttatgggaaaaaccgggggatgttgtcaacaagagacagtaaaaaaggtttatgcacggtcttaatctaaaa

SEQ ID NO: 6429 - DNA, 349 bp, Triticum aestivum
  Clone ID: LIB104-063-Q1-E1-D5
ggtacaggtcaggaattcccgggtcgacgggagaaggtcacatatgtgtaccaggaaaaagtttgcggtttgaaggaggactgaagttcagagtgatgtggctgtgaaggttcagagatgtttttttagtatattcagacatgtttttcctctcttattcttcattttttaacttcttcataattgattagataacttttaaggcaacatgttgttgtctgaaaagcttagggactcttgtgtgtacgtgaaacactttgatcaatagactctttagtttagaaaatgatgaaaaaatatttaaaaaaattccttcagcgaaaatagggagaatataattttcatgggc

SEQ ID NO: 6430 - DNA, 98 bp, Triticum aestivum
  Clone ID: LIB104-063-Q1-E1-D6
taaaggtcaggaagtcccgggtcgacgggaaaaagtaacataattctcccagttctcactttgcggctgaaaggaggcaggacattcaggttcaaatg

SEQ ID NO: 6431 - DNA, 427 bp, Triticum aestivum
  Clone ID: LIB104-063-Q1-E1-D7
cccgggtcgacgggacaaagaaatattacactcacagttctaaatatacgtctcaaagaagtcacggacacccgggttctaaaaagcctgtctcatcatataaggatgatcacaagcacacttttcgtctacaagtttaattcactactgagtcactcagcaatgtaggacccacttgcatgacaaacagagaaagaaaacaatcagtttaggagggacatgaatcttagatctactcgattctagaaacgatggcaccgcaacattagaagcagcaaatggaccaacacaatcgactacaccgtgaggagattagcaacaccaatgctggatctgtgatgcatcgaggaaagatgggcagggaatgaacgaaaaaggtaaccaaaaggaagactcactgtgctttgttctagaaccttcctactgg

SEQ ID NO: 6432 - DNA, 318 bp, Triticum aestivum
  Clone ID: LIB104-063-Q1-E1-D8
ggtaacggtcaggaattcccgggtcgacgggctgcatagaggggggaagagttggtgataaaggcgtgaaattgttggtgaagattgcggtgatgatgatggcccccggcggtgttccggcgccaccggaagcaaagaggagagagcccccttcttcttcgtcttccctgacctcctccctagatgggagaaaggtttcccctatgattcttggctcccaatggttgggaagggcgagagcccctccgagattggatctaactctctgtctctctctgtccctctccgtttctgcttccctgattctgcccttcaacg

SEQ ID NO: 6433 - DNA, 455 bp, Triticum aestivum
  Clone ID: LIB104-063-Q1-E1-D9
ggtaacggtcaggaattcccgggtcgacggattttattcaccacatgatatgtgttttgcttggagcgtcttgtatgatttgagtctttgctttttagtttaccacaatcatcctttctgtacacaccttttgagagagactcacatgatttgaaatttattagaatactctatgtgcttcacttatatcttttgagctatatagtttttgctctaatgctttacttatatcttttagagcacggtggtggttttattttatagaaataattgatctctcattcttcacttatattattttgggagtcctttagaacaacatggcaatttgcttttaggcataataaaaactttcatataagtgcattgaatactaagagaagtttgataattgatgattgttttgagatatggagatagtgatattaaagttgtgctagttgagtagttgtgaa

SEQ ID NO: 6434 - DNA, 435 bp, Triticum aestivum
  unsure at all n locations
  Clone ID: LIB104-063-Q1-E1-E1
ggtcaagaattcccgggtcgacgggggcaagggtggtatttctcctcaggaatttgattgatatcctggaacagctcagaatgttggtgatgatcacgacacatttgtcgagagatttcatgcagatgtaatcgatcggcaatgacatcaagtcaaaggaatgatggagcgaaaggttattggaatcatgggtacaacacaaactcgaaatcaagcttgctgttcaaggcgaaaagtgataagacaaggaagatcgatgtaagcttaacgcattgttggaagttgtgctccgggaagaaggaccacgtagcatagttaaaatttagcatggtaatgatatagccgatcaggctangaatgactataaggattattaaactcgtaagcaacaaacattacctagagttatagaatcggagtgtggaatcgattcac

SEQ ID NO: 6435 - DNA, 263 bp, Triticum aestivum
  Clone ID: LIB104-063-Q1-E1-E5
cccgggtcgacggggatcctgaacgacgaggagccgtgcggggggttcttctgcgactagccgccgctggcgtggtggacggagccgacggatccctggaaatgaggcgcggcacggagcgagagactcggtgggagacgagggatacttcgcgcggggaataaaagattactgctcaatgcacgggcttttctgaaatttttcgaaatggcctgttttatcgaagcgtttcctgtcaaaccctcgccgtcgctatgcagcca

SEQ ID NO: 6436 - DNA, 460 bp, Triticum aestivum
  Clone ID: LIB104-063-Q1-E1-E9
aggtaacggtcaggaattcccgggtcgacggggctaacaccatggaatgttcggtgagtcagtctacagaatatgcctgtgcaaattgagctataacatgccatccatcttacaacataattaaggatatgtgagtacctatttatactactctatgagtatctccaagagatgcacacaaccgtcgcgatgtgacgtaccagcaagtcaaactcaacataagctaaagtgtggaatactgatgatgcaacacctcctactgaagaatgtaaagcctcaatgataacgacatacataaagcaaccaagtaaccctcttgtgaattgtatagccagagccccggctaaacctgcattcaggaataatgttattattcaaacaagcaagattgaagcaagaatatcctgaactatcactaacagaattctatcatcattaaggagtatacatttcaaccttt

SEQ ID NO: 6437 - DNA, 466 bp, Triticum aestivum
  Clone ID: LIB104-063-Q1-E1-F1
cgctgccaggtaccggtctagaattcccgggtcgacgggaacaaggggcggtgctacgacttctggctggacttcagctcgtgcatgagccgctgccgccagccctccgattgcggcctcctccgcgaggactacctcgagtgcctccaccactccaaggagttccagcgcaggaacaggatctacaaggaggagcaacgtcagataagagctgctgctcgcaaggccaaggacgaagccgaaggagctcctgctgttgcagctcaccactagcatccgtttttatttgctgcaagtgcttccatgttcggctatgagcaaggcaataatttcctaaacattctaccctcccactccatgacttgttccaaaatcatgagttcgataaacaaccttggtcaacaagtttgtgcatgtttgagatattaagcgataataaacgcttgattcaaccatgaaacatgat

SEQ ID NO: 6438 - DNA, 449 bp, Triticum aestivum
  Clone ID: LIB104-063-Q1-E1-F11
aggtaacggtcaggaattcccgggtcgacgggtatccaccgtggcgaacttgtagtcagtgctgttgacaaaccagttgaaacggtcgcaaggctctgtggccatgcagtactggtagatgaggacatgatggcgcacgcacaattgagcgacggcaaccttctaatctatgccgggacgaccggcggtgtactgaaggtcgatgccgaccaccttgtacttgtctccagcaagcaactgctcaatgcggttgatgtagtcatccaccatggccgagtcgatggtgtatagaaaaaatgaaaatgtttttgaaaacaaaggataaaataaaaacgaaaaaggataaataaaaggaaagaaatagaagcagaaacagaaaaaagcacaacaaaaaagaaaaaggaaaacggagaaaaccagaaaaccggcaaaaggaaaaaaattaaaaa

SEQ ID NO: 6439 - DNA, 447 bp, Triticum aestivum
  Clone ID: LIB104-063-Q1-E1-F3
ggtcaagaatacccgggtcgacgggaaggtgaaggctgtgctgatcgcgtcgctctactcgggctactacgacaagatccggggcatgtactacgagaacccggccaagacgggggagatcgtggcggtgtaccagccgagccacgaggagaagcaggagtacgcgtccaacgagcacaaccagaaggcgctggcggagatctacctgctcagctactgcgacaagatcgccatgagcgcctggtccaccttcggctatgtcgcctacggcttcgccggcgtcaagccctggatcctgctccggccggactggaacaaggaagtgtccgacgtcgcctgcgtccggtccacgtccgtcgagccgtgcctgcactcgccgccgatactcgggtgccgggccaagaaggaggtggacgtggcccgcgtcaagccctacgtccgacactg

SEQ ID NO: 6440 - DNA, 429 bp, Triticum aestivum
  Clone ID: LIB104-063-Q1-E1-F6
attcccgggtcgacgccaagaaaagcttctatcaatgtatcatcagtatcaatcacgacatgacaccacacaacagatatgctgctgtcagcagtcctctctaaatagacactgcaattatcgtataagtacatcattgctgctgtcagcagtgctctctaaatagacactgcaattatcatgtacatcattgctgctgcaatgaaccattaagagattatttaaaatcgagcctaccatctgcgttgtcgtcaacagagggttgaggcggagttacaaaatctgtatgagaaaccgagggattgtccgagtcagcgacatctttgttatcttcagagctgtcagaagcagctgagatggcgtcacctgattctgaatgtgttctgtccacatatgcttcaggtaaggagctctcggccacgtcagcat

SEQ ID NO: 6441 - DNA, 384 bp, Triticum aestivum
  Clone ID: LIB104-063-Q1-E1-F7
ggtacaggtcaggaattcccgggtcgacggggcgctagacttacggcacatttacggacggagacttggctcctgaatgatcgttcttttttctctctctacccgcgccaccttgctgcacaggagggattgctaacacataatactgcgctgcacctctgaaggaaaattagtagccaccatgaacgcggatcatgcccggtcggtacatttctttgatgcatcttgtttgttcaccttgctgtatagaaagatgagagatcagtgatcggaaccgatgcattctgagttagagattatctgttcttccgtacagggttcaaatatcagtttccgtaccaccatggcgattactatctgacatggagtcagcttttcgcaaga

SEQ ID NO: 6442 - DNA, 365 bp, Triticum aestivum
  Clone ID: LIB104-063-Q1-E1-G10
tcccgggtcgacgggcacaggaaaaaggtggaacactatgtgatctctgtttactcaccattagtcacaagaacgtcacacacctgttgcgtaacacgataatttatcactacacattcttagacggatcctcctacgcgcatgcactcagtgttcactgaaatctatctctatgaactattgctcgaactgtggtcaagaaatatgttgaactcgctccatcttcatcagacatctgtacactatacgatcctgtctcgatagttgcagtcatcatgccacgtatatcctcagtctcatgacttctctactgcctgtactcatatactgtcatcatcatatctcaatttctctctctccgttcg

SEQ ID NO: 6443 - DNA, 370 bp, Triticum aestivum
  Clone ID: LIB104-063-Q1-E1-G11
ggtaaaggtcaggaattcccgggtcgacgggcatgatatcactgtggcggactatgagatcgttgctcatgcactagaggatacggtcacggagcacaccatccgcgtaacacgctccacactaaagaggcgtgctaccacagatgcgggagcgtgaaaccccactgcaaaccaatgttttactgcctcaagtaatcgtcgctctcacgtgctgagtcattctcacattgtcccgtagtcatatgtcgagtgcattcgttagtaacccgtatcaatagttgaactcctcattcatcgcagcgtcctctctaaaggattcaatcctacatgcacgtacacacgtcgtcctagctatacgaaattctctctc

SEQ ID NO: 6444 - DNA, 447 bp, Triticum aestivum
  unsure at all n locations
  Clone ID: LIB104-063-Q1-E1-G12
gtcaggaattcccgggtcgacgggcaagagacagctgttgaacattttgggagctgtgtacagatacaagaagttaaaggaaatgagcgcagaagagaggaagaaggttacaccacgcactgtcacggtaggagggaaagcatttgcaacatacaccaatgctaaaagaatagtgaaattggtaaatgatgttggtgctgtggtgaacaatgatgctgacgtcaaccaatatctgaaggtggtgttcattccaaactacaacgtatcaatggctgaagtgctcattcctggcagtgaactgtcacagcacatcagtactgcatgcatggaagcaagtggaacaagtaacatgaagttctctctgaatggctgtgttatcattggaactctcgatggagccaatgttgaaatcagagaagaattanggcaagacaacttcttcctttt

SEQ ID NO: 6445 - DNA, 443 bp, Triticum aestivum
  Clone ID: LIB104-063-Q1-E1-G3
ggtccagaattaccgggtcgacgggggcggcatgttggggcatcgttttccacggaggctggggagactatccgcgcaaccctgtttcccggtgatggcatcgggcctgagatcgccgagtcggtcaagcacgtattcaatgttgcaggtgtaccgatagaatgggaagaacattatgttggtacggaagttgatcccagaacagagagctttttgacatgggagagcctggagtctgtgcgtagaaacaaagttggcttgaaaggtcctatggctacacctattggaaaaggccaccgttctttgaatcctacattaaggaaagaacttggactctacgccaatgtcagaccttgcaacagcctcccaggctacaagactagatatgatgatgtgaaccttgtgacaatccgtgaaaatactgaatgagagtatactggcct

SEQ ID NO: 6446 - DNA, 437 bp, Triticum aestivum
  unsure at all n locations
  Clone ID: LIB104-063-Q1-E1-G4
acctgccagtgccggtcaagaattaccgggtcgacgggctagcggatgctttttgataagaagggtgatgactcaacataaaagtaaatagataggcccttcgtacagggaagcagggatttgtagaggggccagagctcgattttaaaatagagatggaataacattttgagcggcatacttttgctgtcaacgcaacaactatgatatggctgtatcttccatactacatgcattatacgcagttcccaaacagaatggtaaaggtttatactcccccaaccaccaacaagcatcaatccatggcttgctcgaaacaacgagtgcctccaactaacaacaggcctgngggagttttgtttaattattttgatttgctttgatctttttggatcaaaggactgggcatcccggttaccggccctttcttgtgaatg

SEQ ID NO: 6447 - DNA, 451 bp, Triticum aestivum
  Clone ID: LIB104-063-Q1-E1-G6
aggtaaaggtcaggaattcccgggtcgacgggacgctcaagaacgtgaccccggcgctgcacccggagatgatcctggcggcgaccaacaacggcgacatcgtggacgcctaagcaaagcaatgaaccacggacaccaaggcgtacgtacgctggtgtttcggggcgaaaaatcaataagatggttcggtgaaacagaggatgcttagggacgaggtcttgtctttgtgatttgtcagactcgtgtttaattccgatgtttatctttagttttcttgtgttagcgtattttgttcatgccacctgcccgccatgtgctctgctctgctctgcctcacggcagctccatggatgatgaatccttatggaacaagaggagggaataaaaaggttgagttctatgtaaaaaaaaaaaaaaaacaacaaaacaaaaaaaccaaaaaaaggaaaaa

SEQ ID NO: 6448 - DNA, 199 bp, Triticum aestivum
  Clone ID: LIB104-063-Q1-E1-H1
cgggtcgacgcgatcatcaacaccaacaccaacgttgccggcagcatcatacccaagcgatgacgtcatcgtcaccgcaaacatttgaccccacatcagtataaggtacatttgactacgggagtcgatcgaacactgacactaactacaggttggtcaaaggttcaaagaaattctcctttaaattaggccaatgcta

SEQ ID NO: 6449 - DNA, 473 bp, Triticum aestivum
  Clone ID: LIB104-063-Q1-E1-H5
ggtacaggtcaagaattcccgggtcgacgggaatgtatcgcgctgaggcagacgaggaccatcaaacttgttatgataattggacgggctagaatcagatgctttgcccgaagagaaatcttccagagcttgaatggtgtctcgaactggtgggataaagctcttgtgtgctaccttggccagataggtagtcttcagagaatgatcaatgacttgttggatccaaggagcaaagaatttcaggcacattgggtgatgcgcagaatccttcagaatgcggaggaataagtcttcgacatcgaagacaaatcgatgagaaatagcatatattgtgttccgaagaacatccgagattgatccatcagtattcataccgtccagaggacaaatagtatatgtgagcagatgataaatggtttgattctcgaaggtcaaatgcttaagcatcggagggccatcataatccttaatct

SEQ ID NO: 6450 - DNA, 407 bp, Triticum aestivum
  Clone ID: LIB104-063-Q1-E1-H6
ttcccgggtcgacgggttccgtttattatgacacgctccatcattgtcatattgctttgcatgatcatgtagttgacatcgtatttgtggcaacgccaccgttcataattctttcatacatgtcactcttgattcattgcatatcccggtacaccgccggaggcattcatatagagtcatattttgttctaagtatcgagttgtaatagttgagttgtaagaaaatagaagtgtgatgatcttcatttttagagcattgtcccaagtgaggaaaaggatgatggggactatgattcccccacaagtcgggataggactccgaacgaaaaatcaagaggccatacatcagaagagaagaaaatgcccaagacaaatagtatatgtgagcaaaaaaaagcggccgctct

SEQ ID NO: 6451 - DNA, 367 bp, Triticum aestivum
  Clone ID: LIB104-063-Q1-E1-H7
aggtacaggtctagaattcccgggtcgacgggataagggtctaaggtacctatggattatgacgtcacgtcgtttttgcatgctatcatgtgactccgggatgcctgttttaagatttcgcttgtgttgacagatatgactatctactgcctgtagcctacctgggataccatcatatgttgctgaatatggtactacttttatcctgcttaagttctgtattttgccctagttgaaaaacaagcatagtaatgaatcttcatttttaaaacattgtcccaggtgaacaagacgatgatagcgactatcattctcccagagactccatatatgactcttagtgatcacataaagaggccatacaaga

SEQ ID NO: 6452 - DNA, 438 bp, Triticum aestivum
  Clone ID: LIB104-063-Q1-E1-H8
gggccgacggggagcacaagaaggcggaggagcacaagaagaaggacggggagcacaagaaggacggcgagcacaaggagggcatgatggagaagatcaaggacaagatcagcggcgacggccacggcgacggcaagaaggacggcgaccacaaggagaagaaggacaagaagaagaaggacaagaagcacggcgagggccacaaggacgacgacggccacggcagcagcagcagcgacagcgacagcgactgagccagctccggccgcgctccggcagcagcgtgcagtgtaggcgagatcgatgaacgcttgggagaagtgtggcatacatatatgttgcagggtttggagcgtgtggtaccatatgtatgtaatgcgtgacatgtctcaatggatctgtgatgtataataattagccggctgcactgcactgcac

SEQ ID NO: 6453 - DNA, 322 bp, Triticum aestivum
  Clone ID: LIB104-063-Q1-E1-H9
aggtaacggtcaggaattcccgggtcgacgggaaaccttcgacagcacgatcacctaccggctctcaccataacacgacggtcacttggatccttctccacagaggtgcttaatcatgctcgtccattgcagaggcggagggcatcgcacagggctaacttaatgtctgttatggtatctaaggtgccacctgatgcgaacatggcagaccaaggtggtgaaacaggacatgattcggagccgatgcatatagtactatctattcggtgtgacccaactgtgacagtgttccgacttaacagaccatactttgtggtaccta

SEQ ID NO: 6454 - DNA, 365 bp, Triticum aestivum
  Clone ID: LIB104-001-Q1-E1-A10
tccgggtcaacgggaagttcacaggagacaagcgacggagttagaagttgtaaatatgcattgttgtatcacgacctgaatgaaataaacgaaataatgctcttgttcaaacatcaaaaaaaaaaaaaaaaaaaaacaaacaaaaaaaaaaaaaaaaaaagaaaaaaaaaacactaaaaaaaaaaaaaacaccaaggaaaacaaattattaaaaaaatcaaaaaaaaaaggccctccaaaacaatcaaatctaacttacccttcccttcaacgcaaaatccctccccatctaaaccctaactaaaattaaaggcccggcctttaaaagtacccgcacgggaaaaacacaacctttacccaaccaa

SEQ ID NO: 6455 - DNA, 434 bp, Triticum aestivum
  Clone ID: LIB104-001-Q1-E1-C10
ttccgggtcaacggggccagagatcatcaccaccccgtatgactggcgcatccacgtcggcgatggcgagtcggcgccgcgagaccgcagtgagcgcatctgccaccctgccgctcctcctgtagccggcgtgatgacgacgaagatgaccaccgtcgggaggaccaagaccgagatcgtcggggccgtgacggctccaggaacggcaggggctggggggagagggtgcgtcgcagcctctcccgcgccccccgggacgacaaccgcgaccgtggtcgagagcagcaaggaggtcgtgatggcggtcggcgatgccatgaggaagtggccccttcgctgctgctacgtggctccggctcctccagcgtggtggccgcacacgatgccgagatggtgccagttgctcctccgccgcctggccgtacaatctcccc

SEQ ID NO: 6456 - DNA, 148 bp, Triticum aestivum
  Clone ID: LIB104-001-Q1-E1-C11
tgtacgtgtgaaatgtcatgtagtggccacataagccaaccactggctgtgggtttcaaggatttttgcagtgggatttgtagggtaccatgctgcgctgtgtttgggagttgacatcggtccatgggatatgtgccacgctcttaaa

SEQ ID NO: 6457 - DNA, 404 bp, Triticum aestivum
  Clone ID: LIB104-001-Q1-E1-C9
ttcccgggtccacggggacgtccgtgaaccggtgctccagctgccggaagcgcgtggggctgacggggtcccggtgccggtgcggcgacatgttctgcggcgagcaccggtactcggaccggcacgggtgcagctacgactacaaggccgccgccagggacgccatcgccagggacaaccccgtcgtgcgcgccgccaagatcgtcaggttctgaagctgaaaccaaggggaaagaagaattcagaattccagccgaggcaaagcaaagaatcatctcatcgaggcagtgggccgccgtgcgagccgctagtattatgctgttgttctccggagtgtttccctttttaattaaaaaaatctttatttattggaaggaaaaaaatgggaggtaaagatgtggatg

SEQ ID NO: 6458 - DNA, 451 bp, Triticum aestivum
  Clone ID: LIB104-001-Q1-E1-D12
ctgcagttcggtcgacaatccgggtcaacgggctgggacgaaaaggcacgctaagagggcatcaaataatatgtatggacgggcattctctcactgaagcacactacacagttctacagaattccgccttggtggctccgtatatggacgaacacaagaattttctacagtccaaacacccggagaattctgacgactagattacacgtgaacaaacgaggacttttgccggttggttgcagaaacatgccctgaatgatggtgatattcaaaatgacctatactcgctgtcccagttaccatcttcgaatataatgactttcaaagggtaccagataaatgggaatacattttacacgatcgcccaagataagaagagcagcaagcaaaacagtggtgtctgcttcgatgcaacaaccaacacgggaaaggaagcataataggggtacat

SEQ ID NO: 6459 - DNA, 391 bp, Triticum aestivum
  Clone ID: LIB104-001-Q1-E1-H12
gtcccgggtcaacgggtcggtgcatctcatgatctggaactgcaccatccccggaaagcacgggactgattgggaaagtggatactacccacttactctccacttcactgaggactaccctagcaaacctcccaagtgcaagttcccgcatggttttttccacccaaatgtctatccttcagggacagtctgcctctcgattcttaatgaggatagtggttggagacctgccatcactgttaaccacattccagttggaatacacgagttgcctgatcaaactaatccagctgatgctgcctagactgatggttatcagctcgttatccacgatccagcagagtacaagagaagcattcggatgcaggccaagcactagcctgcctctggt

SEQ ID NO: 6460 - DNA, 195 bp, Triticum aestivum
  Clone ID: LIB104-001-Q1-E2-A10
cgggtcgacgggaggttcacgggagagaagcgacggagttagaagttgtaaatatgcattgttgtatcgcgacctgaatgaaataaacgaaataatgctcttgttcaaacgtcaaaaaaaaaaaaagaagtaaagaaaaataaatggaaaagatatattaatgtaaatgaaatgaaaaataaaatgtatccaagg

SEQ ID NO: 6461 - DNA, 358 bp, Triticum aestivum
  Clone ID: LIB104-001-Q1-E2-A11
aacgtggatgtggacgagtcggatagaaagctcttagatgatgaaaagaaacccgatatcacgaaacgaccacacactcctattggagatgaggtggaatgcaagaagccaaagatagcagaaggctcaaggtgccaaggagaagaacctgaggctggagggataaagaattcctcctgggtctgatgacaggggaatgcagtaaacaccagaagcatcaaaactatgatctggaacagtatcctgaataaactattttctggattatgaatgaattctgaagcatggggctataagtgaattatgtaacatggatttgtaactatggtggatgttaagttaacgttctatcagtgcc

SEQ ID NO: 6462 - DNA, 396 bp, Triticum aestivum
  Clone ID: LIB104-001-Q1-E2-A3
gggtcgacgggtgtgatgtgcttaagatgcagatcctcaacaggaaccctacgacagatggtattgcagttaagaggaaactcaatgctgatggatcctactataaacctgagtagtatcccaaaacctcatgggttactgcaaaaggacctcccgtagatccatcgactttatctggttttacatgtgaatcctcatattcatctgatgagtcatctactctaactagaaattgttcaaaaataatcatggtgaggtatttgccagatatgttggaactaattgcaggaacggtcctcctatgaagaaaatctgggttcccaaaatatgccttgaaagtcttcaggtgaatgtcctcatgacaccacctgtgaagaataggaaccccacatcaaa

SEQ ID NO: 6463 - DNA, 364 bp, Triticum aestivum
  Clone ID: LIB104-001-Q1-E2-B11
ggtcgaaatacccgggtcgacggggaccacaaggagaagaaggacaagaagaagaagaaggacaagaagcacggcgagggccacaaggacgacgacggccacggcagcagcagcagcgacagcgacagcgactgagccagctccggccgcgctccggcagcagcgtgcagtgtaggcgagatcgatgaacgcttgggagaagtgtggcatacatatatgttgcagggtttggagcgtgtggtagcatatgtatgtaatgcgtgacatgtctcatggatcttgtgatgtataataattagccggctgcactgcactgcacggtgcttgtaataataacgttaatgaatcatgttggtattgatac

SEQ ID NO: 6464 - DNA, 445 bp, Triticum aestivum
  unsure at all n locations
  Clone ID: LIB104-001-Q1-E2-B2
cggtcgagnattccgggtcgacgggaacatctcctcccactgaaagcgcatcgccggaaatcctgaaataaatccaggaataatgcgagcaccaggatttgaaccctggtgggttggggataccactgtccacctaaccaactcaaccacaggttgattcgcaatgactacatgtattaacgaattactacatgctcattataattgctcttttacgatgctaagatggttagttatgatcaattagtggtttgagggctaggcgtcgaggtaacttgttactattggctttttttttgaggaatgtgggcctgtcgaagcggtggactctggtgttacgttagaattttcacagatgagcgcaatgcacaaaaaaaggaaaccaaagacttcccaaatctggcacgattccccaccatctccttcctctagaacattctgtctc

SEQ ID NO: 6465 - DNA, 304 bp, Triticum aestivum
  Clone ID: LIB104-001-Q1-E2-B3
atttaaacatgtccatggattcatgtctgtacaaagtgtttaactgatgattacatcccaaagtagatgcacagtcaggaggcgatttaagtttttataaaatacccattgttcatgctccaagtgtacgctaagatgaccaactatggtcagtcagtcgtttgagggcctagcctccaggtgcattgtacctcaacatcaattatggcacagatattcaccttcctcttcaagattgatccagatgagacgcaacgatctgtataccatctcgtatgcgaatttctgaaggttgtaaatattt

SEQ ID NO: 6466 - DNA, 186 bp, Triticum aestivum
  Clone ID: LIB104-001-Q1-E2-C11
cgggtcgacgggcaatggaggatgtaggtgtgatatgtcaagtagtggacagataagccaaccactggatgtggttttcagggatttttgcagtgggatttgtagggtactatgctgcgctgtgtttgggatttgaaataaaacgatgggagatgtgccacgctcttaaaaaaaaacaggagaggg

SEQ ID NO: 6467 - DNA, 125 bp, Triticum aestivum
  Clone ID: LIB104-001-Q1-E2-C12
aacgctaaattgagtcgtattatgtcatgtagtggccaattaaccgacacacaggatgtggttttcaaggatttttgcagtgggaattgtatggtactatgctgcgctgtgtttgggagttgaaa

SEQ ID NO: 6468 - DNA, 452 bp, Triticum aestivum
  Clone ID: LIB104-001-Q1-E2-C4
cggtcgaatattccgggtcgacgggtgtatttgatgcggcaataaatgtggtacttgcgccaccaaatgcgaagaagaagaaaaaggcgcagaggggggcttgctccatcttgtgatctaatcatcggtagacaaagaacaagggcgaagttgccgccatgctatattattgttacgtcttgcttcagcggagctgcactctcatggtcgtcgtccctcccccctaccccaccctaggttacccaccggcagctgcagcaaggtctctttgtcgaggcatcgggcgatccatttgtttgatttctcttcttcctgccttgtgattatctcgtgtgactgacaagtcgtggcaatttaggtaacttgcttagtagacggtatttcccgtgtttgagaccccgtaaaaaaaaagtatctcgttgttatctcggttccataagtagagacatgat

SEQ ID NO: 6469 - DNA, 405 bp, Triticum aestivum
  unsure at all n locations
  Clone ID: LIB104-001-Q1-E2-C9
cgggtcgacggggacgtcggtgaaccggtgctccagctgccggaagcgcgtggggctgacggggtcccggtgccggtgcggcgacatgttctgcggcgagcaccggtactcggaccggcacgggtgcagctacgactacaaggccgccgccagggacgccatcgccagggacaaccccgtcgtgcgcgccgccaagatcgtcaggttctgaagctgaaaccaaggggaaagaagaattcagaattccagccgaggcaaagcaaagaatcatctcatcgaggcagtgggccgccgtgcgagccgctagtattatgctgttgttctccggagtgtttccctttttaattaanaaaatctttatttattggaaggaaaaaaatgggaagtaaagatgtggatgaaaaa

SEQ ID NO: 6470 - DNA, 402 bp, Triticum aestivum
  Clone ID: LIB104-001-Q1-E2-D1
cggtccgagaatcccgggtcgacgggcggcctgtcctacaactatgacaataccctgactctcaaggggcgcttcaactcggatcttcatgtgggcgggatgatacagtttgaagaaaggttggctagtattgtgttgcgggcaacaggtgatgttgatcttcgtgctatgggtcagcagccccgggtcgggttccaagtggtgtttgacccgacctggaagtaagtagcctttgcctttgcagtgttggtgcttgttttgcttttgcttgggaggaacttttttggtaaaacggaaggtcttgattttgggttgtccatgatgattgatgtatggactgaagctttagacttgtcaattcgactatgttggttttgcggaagcttgattgtcctctcatac

SEQ ID NO: 6471 - DNA, 436 bp, Triticum aestivum
  unsure at all n locations
  Clone ID: LIB104-001-Q1-E2-D12
gcacggtcgagtatcncgggtcgacgggctggaaggaaaaggcacgctaggagggcatcaaataatatgtatggacgggcattctctcactgaagcacactacacagttctacagaattccgccttggtggctccgtatatggaggaacacaagaattttctacagtccaaacacccggagaattctgacgactagattacacgtgaacaaacgaggacttttgccggttggttgcagaaacatgccctgaatgatggtgatattcaaaatgacctatactcgctgtcncagttaccatcttcgaatataatgactttcaaagggtaccagataaatgggaatacattttacacgatcgcccaagataagaagagcaccaaccaaaacagtggtgtctgcttcgatgcaacaaccaacacgggaaaggaaacatat

SEQ ID NO: 6472 - DNA, 157 bp, Triticum aestivum
  Clone ID: LIB104-001-Q1-E2-D2
acggtccgactattccgggtcgaccggaagatcgcactaactgagctgacagacgctcactcgaaacgggggtctcaacccgcatgataagttcagcgcaatacgacagatatcaaaaccgatggctactgctgcattgaggtcaacaagtgaagtt

SEQ ID NO: 6473 - DNA, 418 bp, Triticum aestivum
  Clone ID: LIB104-001-Q1-E2-E10
cgggtccacggggttaatcataagtaggaggtttgttcaagtaagaacagtacctaagcaccggtccacccacatatcaaattatcaaagtagcgaacacaaatcaaatcaacatgatgaaagtgactggatgaaattcccgtgtaccctcaagaacgctttgcttattgtaagagatcgttttggcctgtcccttgcctcaaaaggattgggctaccttgctgcacctttgttactattaccattacttgctcgttacaaaatatcctgctatcaaactactatgttacctacaatttcagcacttgcatacattaccttgctgaaaaccacttgtcattaccttttgctcctcattgggttcgacactcttacttatcctagaagagctacaattgatcccaatacttgtgggtca

SEQ ID NO: 6474 - DNA, 412 bp, Triticum aestivum
  Clone ID: LIB104-001-Q1-E2-E2
ccgggtcgacgggaggggttgttttcttctctaagtcctttttcctcataacatatgcccttgttcaccgcatcgtaactttgcacccgtagctccgttttgggcgtgtagcatatcaaattgttcatctggatatgcacttcatttcattccattgtaccatattcatttgaggtcatcttgatgccctaaatgctgttgcaagagtgctatgtaatgttagtttcagattcttaccagattatcgacatttgtcatttttgccatgtttaatgatgaggacatgactaccttggatatgaccaaaaatattgcatatatgcatatttgtcaggtgatttctagtgcaaactattcaataatctatttatgttatccagaacaaaaatacttcacacacttttgtgttttg

SEQ ID NO: 6475 - DNA, 444 bp, Triticum aestivum
  Clone ID: LIB104-001-Q1-E2-E3
cggtcgagatattccgggtcgacgggtacttgaatattgttatgataattatgcttctaatgcctatgttaaaccatatattgagaaattcaacgctgacgaagaagagactaatattttgcaggacgctatggaagaagaaattgatgaaactgtgagctcattggatgaaagagatgatgaggagagcgaagaacaaaggaggaagagcggattagctacccgtgtccaccttctaatgagagtaaccctccaactcatacattatttaattccccttcgttcttaccgaaggatgattgctatgatgattgctatgatcccttgaatttgtttgaaatatccctttttgatgatgctttctatgcttgtggccaagatgccaatataaattatgcttatggacatgaacttgctagagtccttatgttaaacatgaaattg

SEQ ID NO: 6476 - DNA, 438 bp, Triticum aestivum
  unsure at all n locations
  Clone ID: LIB104-001-Q1-E2-E4
ggtccgagaatcncgggtcgacgggctgtgcgtctaggctggatggtaataggaggcaagggacacgaagttttatccaggttcgggccctctcgatggaggtaaaaccctacgtcctgcttgattaatattgatgatatgggtagtacaagagttatttgttttgtgcaggtacgagggactcgtgcatagcctcctactggattgataccttggttctcaaaaactgagggaaatacttacgctactttgctgcatcatcctttcctcttcaaggaaatccaacgcagtgctcaagaggtagcagacctttccttagaacgtttggtgcaattattgatatgaaggaagggaatattatattccaatttccgttaaggaaaggcatggaacacttccctagaaagaaaaataaattaccttatgaatctattatga

SEQ ID NO: 6477 - DNA, 289 bp, Triticum aestivum
  Clone ID: LIB104-001-Q1-E2-E6
ttcccggtcgacgggcggtggcgcgagcttggagctgctggaaggcaagcccctcccaggtgttcttgcccttgacgaggcgtaggttgattcggtttcacctatcagcttgctgcgtgccctttgtttgggatctcatcttggtctaacgctggaacgttatatgtcccaatgaaactttgacataggcttgtcgccaatttttgctagtaaatgagtcgtgaataagtatcaatttgctccgtgcgagtgaactcatgtgactggaacttaacgtagccccgtcgat

SEQ ID NO: 6478 - DNA, 124 bp, Triticum aestivum
  Clone ID: LIB104-001-Q1-E2-E7
acgcggccgtacggactgaattcggggtcgacgggaagatctcactgactgagctgacggacgcgctgcggacgctggggtcgacctccgcggacgaagtgctgcgcatgatggcggagatcca

SEQ ID NO: 6479 - DNA, 211 bp, Triticum aestivum
  Clone ID: LIB104-001-Q1-E2-E9
tcgagggcaaggggactggcatggatgcatcctgtgtggatgcattcagccaaccaacttcctacggataatggtttgttaccattcccaagaattgctactttttcttcgcatgttgggtagtttgctgtatcatgacgcagcttgttacctagacacgcttctctggcatatattagctcggtgattcaataagaacgtctcgtttccg

SEQ ID NO: 6480 - DNA, 410 bp, Triticum aestivum
  Clone ID: LIB104-001-Q1-E2-F1
atcctgccgcacggtcgagtattccgggtcgacggggagtgcgacgaaggtgccatggccgccatagcccagtctgcgccggattctgtgctgatgacattggcggagtttgagacggcaagagaggcgtggaatgcactcaaagagatgaggattgaataaaatcgtgtcacgaaggctcgggcacaagtgctgaagcgccaatttcacaagttgcagatggagaaaactgaatcggtgaacgactatgccatgcgtctgactactttggtgggagagatccacgcgcttggtgcaaagctcgacgagaccgagattgtggagaagtttttcagttcggtgactgataaattcacgtacatcatcggcacgctcgagcagctttacgacatcgacgacatgaccataac

SEQ ID NO: 6481 - DNA, 412 bp, Triticum aestivum
  Clone ID: LIB104-001-Q1-E2-F10
cgggtccacgggaggggttgatttcttctctaagtcctttttcctcataacatatgcccttgttcaccgcatcgtaactttgcacccgtagctccgttttgggcgtgtagcatatcaaattgttcatctggatatgcacttcatttcattccattgtaccatattcatttgaggtcatcttgatgccctaaatgctgttgcaagagtgctatgtaatgttagtttcagattcttaccagattatcgacatttgtcatttttgccatgtttaatgatgaggacatgactaccttggatatgaccaaaaatattgcatatatgcatatttgtcaggtgatttctagtgcaaactattcaataatctatttatgttatccagaacaaaaatacttcacacacttttgtgttttgt

SEQ ID NO: 6482 - DNA, 229 bp, Triticum aestivum
  Clone ID: LIB104-001-Q1-E2-F11
cgggtcgacgggacgggttgtagtctgcgagtagtacatattctgcatcttagatgcggttgtgcatttcatcgtaacgttatgggcatctaaccgtgatgggcgtgtagcatacatatgagctcaactggagatgcacatcacttcgatccattgtaccagattcatgagatgtcaacgggcagtgccagatgctgctcaactagtgctctggagcatgatcttcata

SEQ ID NO: 6483 - DNA, 443 bp, Triticum aestivum
  Clone ID: LIB104-001-Q1-E2-F3
cgccacggtccgtacaatccgggtcgacatgggcgacatgctgatgatggacaggttccgtcaatggcaggccacgcacaaccggtcgtacctgagcgcggaggagaggctgcgtcgcttccgggtgtaccgcgacaacgtggagtacatcgacgccaccaaccggcgcggcgacctcacctacgagctcggcgagaatgagttcgccgacctcacccaggaggagttcctagccaggtacgcgtcgtcctacgatggggtcggtgatgatactggcatcacgttgcctgtgggcggtggcgacgccgagctgtggtcgtccggcggcgacaatgatagctccttggaggctccgcctcccagctgggactggagatccaagggcgccgtcacaccggtcaagtcccaaggcgcaggatgcgctagctgctgggcgttcgtga

SEQ ID NO: 6484 - DNA, 388 bp, Triticum aestivum
  Clone ID: LIB104-001-Q1-E2-F4
gggtcgaccggaggcggtcacggtacaaaaagcgcgacgacgacgacgatgatgagaggaagccgcggtacaagaagcacgacgacgacgatgatgaccacgagaggaggccgcggtacaagaaacgtgacgacgacgacgatgatgacgatgacagaaagccacgttacaagaagcgctacgacgacgacgacgatgatgataggaagccacgttacaagaagcacgatgatgatgatgacgacgacgatgataggaagcagcgtcgcgggaacaaccgccgccgccacgatgacgatgactgattatgacatgagtttaagctgacgctaataagcatagttgcggcggctttgcatcgatgaattacgacatttcactttttttc

SEQ ID NO: 6485 - DNA, 432 bp, Triticum aestivum
  unsure at all n locations
  Clone ID: LIB104-001-Q1-E2-F9
gggtcgacgggtacttgaatattgttatgataattatgcttctaatgcctatgttaaaccatatattgagaaattcaacgctgacgaagaagagactaatagtttgcaggacgctatggatgacgaaattgatgaaactgtgagctcattggatgaaagagatgatgaggagagcgaagaacattggatgaagagcggattagctacccgtgtcgaccttctagtgagagtaaccctccatctcatacattatataattcgccttcgttcttaccgaacgatgattgctatgattattgctatgatcncttgaatttgtttgaaatatccctttttgatgatgctttcaatgcttgtggccaagatgccaatataaattatgcttatggacatgaacttgctttagtccttatgttagacatgaaattgttg

SEQ ID NO: 6486 - DNA, 293 bp, Triticum aestivum
  Clone ID: LIB104-001-Q1-E2-G10
ccgggtccacggggtctacagcaacggcggtgttgttctcccacacaaggagatcaagtcaagcatcctgaagcctgagatcgtcatgtgagctcaccgctcacaaatgcttttaggaacgatgttgtgtggcgtctttgttctagtgcatactgtaaacagcttaatatatgtggaacttgcgagacttgttaaactgatgagagtgtatgtgcaaaatgaaaaagaagttagtaaatccaataacaagcaagtaaaggtagagattgcctcacacaaataagacatcaagg

SEQ ID NO: 6487 - DNA, 375 bp, Triticum aestivum
  Clone ID: LIB104-001-Q1-E2-G11
ccgggtccacgggacgtatagtattctgagagtcctaaacaacatggtaatttgctttggttatgaatttaatcctaatatgatgggcatccaacagggatatacttgtaactttcatatgaagtgcactgaatactaagataagtttgatacatgataattgttttgagatatgaagatggtcagtggcagagccaactcaagtttatagccggggcatgatctacatgctgccaaattacttactttctacccaaacaaacgtccacttcacccaattttctctactaaagcttcatggacttgcaccaagggagcccgggcatgtgctccagcgtcacacgtgctgtcaacggcactgaagatggtgatatt

SEQ ID NO: 6488 - DNA, 383 bp, Triticum aestivum
  unsure at all n locations
  Clone ID: LIB104-001-Q1-E2-G12
cgggtcgaccggacttatattattttgagagtcctaaacaacatggtaatttgctttggttatgaatttagtcctaatatgatgggcatccaagagggatataataaaaactttcatatgaagtgcattgaatactaagagaagtttgatacttgataattgttttgagatatgaagatggtcagtggcggagccaactcaagtttagagccggggcaagatctaagtgctgccaaattacttagtttctacccaaacaaacttccacttcacccaattttctctactagagcttcatggacttgcaccaagggagcccgggcaagtgccccagctcgccaggtgctgtcancgccactgaagatggtgatattaaagttgtg

SEQ ID NO: 6489 - DNA, 376 bp, Triticum aestivum
  Clone ID: LIB104-001-Q1-E2-G2
cgggtcgaccggaggttcacaggagagaagcgacggagttagaagttgtaaatatgcattgttgtatcgcgacctgaatgaaataaacgaaataatgctcttgttcaaaaaaaaaaaaaaaaaaaaaaaaaaaaaaaaaaaaaaaaaaaaaaaaaaaaaaaaaaaaaaaaaaaaaaaaaaaaaaaaaaaaaaaaaaaaaaaaaaaaaaaaaaaaaaaaaaaaaaaaaaaggggcccccaaaaagattaaaagttaaattacccttaaaggaaaattaaaaccccttcaaaagtttcccaaaattcaaattaaggggctttcttttaaaaaattcttaaggggaaaaacccggggttaaccaaattaaacccctttg

SEQ ID NO: 6490 - DNA, 407 bp, Triticum aestivum
  Clone ID: LIB104-001-Q1-E2-G3
cggtcgtacattccgggtccacggggtttctgcattggaatttttcatttatcattctgacgttataacactttggttttctttcatttccatatttggtttcattgatgtcattgtttatttaacttttctttttgttctttgtaagtttgtaacagttttgtaattttttacacatgtttacttttttctcagtatagaatgtaaatttttaaagcacacatgaaatattttgggtacccattgaacatttttcagatacattatgtacatgttttaaatacatgctttgaacactttttcaaatgcatattatcagtatatattttctaaactatgcaaatatttgtctgcattgtacataccatttcagaataatcacgaacatctactggaaatatatgatt

SEQ ID NO: 6491 - DNA, 397 bp, Triticum aestivum
  Clone ID: LIB104-001-Q1-E2-G8
tccacggggctgaagaaagtgagtgcgttgaacttacaaaagctgatataaactcacgcatttagaagctagatatggttcttggaactcgttccactgttcagcataatagtgatactgcctatagtggtctacatttgttttgcttacagttgaagggcctaacttgtagaacgatcaacattgtgtcaagaagatgcaagtgtatgtacgcatgtgcaaggggaacaagaacggagttacaagtgatgatttcaggactttgaatccaccataatgggtgcatgaagccttggactaaatatacaagatgctacttcataaatttcgttccgaggctattttaggtgctgcgtcaccttagtattgggccaggcccatgtaatttcgaaataca

SEQ ID NO: 6492 - DNA, 356 bp, Triticum aestivum
  Clone ID: LIB104-001-Q1-E2-G9
cggtcgtactatccgggtcgactcctcaggagacggctcttcgccctggggtcttgaggggcgcagcctgccccgatgtcttgaaaggttatgggactcgggttggcctacccgtggtccattactccgacaaatactaagagaagtttgatacttgatgattgttttgagatatgaggatggtaatattagagtcgtgctagttgagtagttgtgaatttgagaaatgcttgtgttgaagtttgcaagtcgcgtagcatgcacgtatggtaaacgttgtgtaacaaaaatgaaacatgaggtgttatttgattgtcctccttatgagtggcggtcggggacgagcgatggtcttt

SEQ ID NO: 6493 - DNA, 439 bp, Triticum aestivum
  Clone ID: LIB104-001-Q1-E2-H10
gtcgaccgggagattcaattaatgacgagctgaggaaaaaggagaataatcgtttgattttggccaaacatacctctcttttgaagaacatgaagagaaaactcattttggcgaaaacaaaggttgcaaaagcagagatggctttggcgaaagttcaggaatatctctctccagcagagcttccaacggatctggaaactgttacagacgaggagcgtttcctattccgcagaattggcctgaaaatgaaggcctttttgatgcttggcaggcgggaagtttttgatggtactgtgcaaaacatgcacttccattggaagcatcgagaattggtcaaaattgttgtgaaggggaagacctttgaacaagttaaacatattgctatctctctagaagctgagagtggaggcgtgctcaatgcactcgacaagacaacaaa

SEQ ID NO: 6494 - DNA, 438 bp, Triticum aestivum
  Clone ID: LIB104-001-Q1-E2-H11
gggtccacggggagattcacttaatgacgagctgaggaaaaaggagaataatcgtttgattttggccaaacatacctctcttttgaagaacatgaagagaaaactcattttggcgaaaacaaaggttgcaaaagcagagatggctttggcgaaagttcaggaatatctctctccagcagagcttccaacggatctggaaactgttacagacgaggagcgtttcctattccgcagaattggcctgaaaatgaaggcctttttgatgcttggcaagcgggaagtttttgatggtactgtgcaaaacatgcacttccattggaagcatcgagaattggtcaaaattgttgtgaaggggaagacctttgaacaagttaaacatattgctatccctctagaagctgagagtggaggcgtgctcattgcactcgacaagacaac

SEQ ID NO: 6495 - DNA, 430 bp, Triticum aestivum
  unsure at all n locations
  Clone ID: LIB104-001-Q1-E2-H12
gggtcgacgggtcaagcataagtcgtagaaactgcaccatccccggaaagcaggggactgattgggaaagtggatactacccacttactctccacttcagtgaggactaccctagcaaacctcccaagtgcaagttcccgcatggttttttccacccaaatgtctatccttcaaggacggtctgcctctcgattcttaatgaggatagtggttggagacctgccatcactgttaagcagattctagttggaatacaggatttgcttgatcaacctaatccagctgatcctgnccagactgatggttatcacctctttatccaggatccagcagagtacaggagacgcattcggctgcaggccaagcagtaccctgctctggtttggggatccaacgtaacagtctaaaatcatgaattaccgcacctgaa

SEQ ID NO: 6496 - DNA, 147 bp, Triticum aestivum
  Clone ID: LIB104-001-Q1-E2-H3
acggtcgtatttcacgggtcgacgggatttctgcagtagaaattgtccttgatcatgacgacattattacacggtggttcacttgacatttccattattagtactatgatttcaatgttttgaaaactaggccttcagttctatgta

SEQ ID NO: 6497 - DNA, 441 bp, Triticum aestivum
  Clone ID: LIB104-001-Q1-E2-H6
attcgcgcgtcgacggacctgcagcaatacatactggaccaattactagagctcgtgcacgccaactaaattaccaggtactttcgtttcttggtaatggttctaatgttcatgagaatatgatgctgcctaaattggatacatttgttttgcttacaaatgaagggcctagcttggagaaggatgaacattggagcaagaacaagcatggagatgatggcatgtgcaaggggaacaagaacggagttacaagtgatgatttcaggactttgaagccaccataatgggtgcatgaagccttggacgaaatatacaagatgccacttcataaatttcgttccgaggctattttaggtgctgcgtcaccttagtattgggccaggcccatgttatttcgaaatacataagtataggctatttttagagtccgtatgtgttggg

SEQ ID NO: 6498 - DNA, 444 bp, Triticum aestivum
  Clone ID: LIB104-001-Q1-E2-H8
cgggggacggacggggcggcaactgttgcagccgcaatgttcccagcatttgcgagccagatacagcgaaatgccagaggtagctagcgcataatagtgcactagtagtagtacacttgtatcagcttcagcaaacgattccctattcccaagaaattgcacgtatatggagagttgaggcaaagaacctgcttcagcagtctccctaaacccaaaaaattatctcctcaagtagtggagagttgcaaccctccccataaattttcaatgcttgccatgtcagtgcgccgcctccattgaccgccgcgcgactggaccactgccgcctgctggaacatcaccgctggcgccggacttctgtgctgccgttgctggacatccgcgccgccgccagctgtcatcgcagccttgacgaaaagatgcaaatgggagagaggggaaaaa

SEQ ID NO: 6499 - DNA, 446 bp, Triticum aestivum
  Clone ID: LIB104-001-Q1-E2-H9
ggtccgaatatccgggtcgacggggcggcaactgttgcagccacaatgttcccaccatttgctagccagacacagctaaatgccagagctagctagcgcataatagtgcactagtagtagtacacttgtatcatcttcagcaaactactccctattcccaagaaattgcacgtatagggagagttgaggcaaaaaacctgcttcagcagtctccctaaacccaaaaaattatctcctcaaatagtggagagttgcaaccctccccataaattttcaatgcttgccatgtcagtgcgccgcctccattgaccgccgcgccactggaccactgccgcctgctggaacaccaccgctgccgccggacttctgtgctggcgttgctggacatccgcgccgccggcaactgccaccgcagccttgacgaaaagatgcaaatgagagagagg

SEQ ID NO: 6500 - DNA, 402 bp, Triticum aestivum
  unsure at all n locations
  Clone ID: LIB104-002-Q1-E1-A3
gggctgccaaagaccaaagtgaggaggtcgccaaggaccaatcttcatagttcttgttcctccacggcgttgtatccgctgttgtatctgatgctcaaagtagatgtcatgtggcggcgccctcccgtgctgcgaaaccgaaactgacttggcctgagtttcgtcgttgttccatgctcccggctatcctagatggtaggtaatgtcggaacacagggggatggtggggcagtgttgttaccatatgatccaaggggtaccttttctttcttcatgctgaaccttgtactgtgtagcttctatgctggtgtttcatgctagtgatttttagcagtaaatgcatgtaacctgactatttgaatgatttgaacaaagttgtgcgaaaaaaaaaagaaggnggag

SEQ ID NO: 6501 - DNA, 201 bp, Triticum aestivum
  Clone ID: LIB104-002-Q1-E1-A5
aagtgagtcgtattagtggacaatcctgtataagtcttgtgccgccatggcgttttatcacgcagttgtcgctcatgctcaaggtatatgtcatgtggctgcggactcccgtgctgcgaaaccgagactgacttggcctgaatttcgtccttgttccatgctcccggctatcctgcatcgtaggtagtgtcagcacacacg

SEQ ID NO: 6502 - DNA, 428 bp, Triticum aestivum
  Clone ID: LIB104-002-Q1-E1-B1
cgacggggacccataataataaaactcggatgacaacactttctcaaaataatcataacatgatattacaaaatggtatctcgctagccctttctaagaccgcaaaacataaatgcagagcacctttaaagatcaaggactgactaaacattgtgattcatggtaaaagagatccagtcaagtcatacccaatataaaccaaaagtaatgaatcaaaatgacagtgttctctccagcgggtgcttttaataagaagggtgatgactcaacataaaagtaaatagataggccctttgtagagggaagcagggatttgtagaggtgccagagctcgattttgaaatagagatagaataacattttgagcggcatactttcgctgtcaatgcaacaactatgagatggctgtatcttccatactacatgca

SEQ ID NO: 6503 - DNA, 416 bp, Triticum aestivum
  Clone ID: LIB104-002-Q1-E1-B11
cggggaattgtgacaaagttgagtgtttcatgggcccctgacgtatatgatcctcctgttacttctgactcacacacagtgaagccgcaccagagaagttcaaggaagagccactacaaatacaagcccccaaagggcagcagcagcagcagccgcactagcagtggcagcaaaaaggacaagaagcattctcaccacagcagcagcagcagcagtaaaagagataagaaaccttcccaccgcagtagcaatggtggcagcagcagaactgacactagtgatcctcaccatcggaaggcatatggcagcagcattaccagcagaactgatactagtgttcctgaatatcataagttatcgccgtggcagccaccggctagtgccgcagtggaagaagccatgccccctgtacctgt

SEQ ID NO: 6504 - DNA, 339 bp, Triticum aestivum
  Clone ID: LIB104-002-Q1-E1-B12
accggtcctagattcgcgggccgacagaagacgacaaaagcggtgaattgtgactaagttgactgtttcatgggcccctgacgtatatgatcctcctgttacttctgactcacacacagtgaagccgcaccagagaggttcaaggaagagccactacaagtacaagcccccaaagggcatcagcagcagcagccgcactagcagtggcagcaaagatgacaagaaacattctcaccacagcagcagcagcagcagtaatagagataacaaaccttcccatcgcaatagcaatggtggcagcagcaacactgacactagtgatcctcaccatcggaatgc

SEQ ID NO: 6505 - DNA, 262 bp, Triticum aestivum
  Clone ID: LIB104-002-Q1-E1-B3
ctcccgggtcgaacgggtcgataactctttctttagcagcattgaaatcctcttgaacctttagggaatgccgctgcagtctactaaagaaatcaaacagacccaactgctcaactacaaatttcgtaggagtaatctgtcgcacacatgcacctcataccgaggttaaatgattcaaaatgattgacgaagctaaaatctaaagacaacttaagattactgaaaactgcccaaagcaataatatgactgagttgttagatg

SEQ ID NO: 6506 - DNA, 435 bp, Triticum aestivum
  Clone ID: LIB104-002-Q1-E1-D1
acgggttatcttggagtattaccatcttttatgtcaaggatgttgtgaggactgctccacctcttaaagaattcttggtattgtgatacttctcaccctcaccattctttcttggtccgcgtgttgattctaaccgggataccaacacgtgaaccatgctgcttggattctgtacttctagcaaccctattgctttgaagttaatggtcaacatttcatccttagaccattggttattgaatcaccattctaacattgatcctgctacctaagcccatatttcgggtgcacctttcaaccagtgattaattgtggtatgtttccctcgagtatacatcattatatcatttgatctgttaaatgttatctccttgttcacataattgtggaaatccacctttttgtgaatctcaatgaattgtcactgagcccatc

SEQ ID NO: 6507 - DNA, 184 bp, Triticum aestivum
  Clone ID: LIB104-002-Q1-E1-D3
cgggcacaaacaaaggtggtcacaaggaaccacaatagtattccaagcactatcctttggcactatcatcctgtacataagcaaggcaaccccagtccccaatctatacctactttgtaaggggagaaggtttcttactgctgaattttcatccgttaatttcgtttgtccatcacggtaacaa

SEQ ID NO: 6508 - DNA, 403 bp, Triticum aestivum
  Clone ID: LIB104-002-Q1-E1-E2
attccaggtcgacgggtgctaatctcatggtaagtaatgacattacataagaaagattgtaagcagtaaaatttattgaaagttgacgaacatagcattggtcaatgatgcatttcatgaaagaaattaataagggaagacaagattcacatgcaaatataccgtcttggacttcttttatgattgtgagccccattaagtattttatgtcaaattattgacgttggacaaggaagacaacataatgatttatgtttgttcatattcacacagaagttactagcaaaagagcccgtgcgttgcaacgggagagaaaacataacacacactcttaacccgacaaccatcacccaagactacaatatgtccatcccctttaatttttcgagatatcatatttgtg

SEQ ID NO: 6509 - DNA, 324 bp, Triticum aestivum
  Clone ID: LIB104-002-Q1-E1-E3
acgggtccggccgcgatggcgctcttcagcgaccccggcatgtacgtccaccccatcaacgtggaggcgctggcggagtcgtagtgtggaggaccgccagcgatctggccgtgtgtgcttaggacagtttttatcgaaccaaaaacttaatttccaaatagccgcctcaaagcatatcttccaacaaattctgagttttttttacgttgcatttctatcctaaaactttccttttgttatttctcccatcctgttgcgtatgtaaatctcacttccgcgtacattttaaaaacatttcaattgtgaatgcacgaaatcaatttc

SEQ ID NO: 6510 - DNA, 393 bp, Triticum aestivum
  Clone ID: LIB104-002-Q1-E1-E4
ttccaggtccacggggctggtggaggctctatggttatcatgttgcgaaaatccagtttttccctacaacaaaggaatatattttatttaactacaatgtttgttgaaaaacatttagaatggtaaccccatctcaatcccaattaataatcaataaccccacaaattaattaagtaaagtgatgagatcaacatagtaattcaagcaccagacactcaagatgtccataaccggggacacggctaccatcattagtttatacactctgcagaggtttgcacacttttccccacaagactcgatctcctgcattgtatttcacgcactgcatggtgtttgagaaatggatgatctagacacagtctttccgaagaggtccccttaaccgatag

SEQ ID NO: 6511 - DNA, 245 bp, Triticum aestivum
  Clone ID: LIB104-002-Q1-E1-F6
gggtccacggggcactcgcatgccacgatgctgactgtgatgaccattaagctgatactcgctcttctcggcgtacgcatcacactagcgtgacttgtgaagatatcaagtgcagcatgtaacaggggcagttagcctgttctggaccaatgagtgatgagtaatctgctgggatattgttcaggcgttcatgtgtatgactcaaaataatgagtgtgtttcctttccacacttagcgatataaa

SEQ ID NO: 6512 - DNA, 461 bp, Triticum aestivum
  unsure at all n locations
  Clone ID: LIB104-002-Q1-E1-G1
cgcctgctgngtacggcccagaattccgagtcgacgggaacgtcactcagaatatggccctcaagctaaggaacaccgacactggcgagctcatcatgcacctggagtgggttaacctccccccaggcatgtcgcggtgatttgatttgatttgcagagggaggccagctattgtctgccttttgtgatcgtaatgttgcttcctctatatatgagctatgaaaataattaagcgatgcctatctcattctttacataacacccaccgtaatgatttgtggatctcaccaggatggtgcgtatataatatgagcaacgtcgtggtgagatccgcagatcatcacagtgggtgctacgtaaggcatgtgatagacttatgctgctgggggtaatgcttgctttcagttttggttctgcatatgttgtatggctatttttatacaaaaaagtatattttgtcc

SEQ ID NO: 6513 - DNA, 152 bp, Triticum aestivum
  Clone ID: LIB104-002-Q1-E1-H6
tcccgggtctacggaggaagaagatggtcggcgtctccctggcgcatgactccgctgaataacattccattgcgataatatttgagctgcctgccatcagtgtgcaagccatccagaagatcctgtcggtctcgctggctctgcaattgttc

SEQ ID NO: 6514 - DNA, 272 bp, Triticum aestivum
  Clone ID: LIB104-002-Q1-E1-H8
cgggtcgaccgaaagcgacaacggacgataaacagggtgtcgtactctcctcccgagactccactgatgcttgctgatctccacaaccttacaggggtctacaaaacagactttcccacaatgccaaccaatgcgcgaccaaggaaggcttcatctgtgctgaatgcttcttacaagggcttcctctagatggtcctccataacactgagacggatgttcagacctagcatctggatggttagtcattctttgtagtcgggatgggaccatg

SEQ ID NO: 6515 - DNA, 403 bp, Triticum aestivum
  Clone ID: LIB104-002-Q1-E2-A1
gtcgacggggagccataataataaaactcggatgacaacactttctcaaaataatcataacatgatattacaaaatggtatctcgctagccctttctaagaccgcaaaacataaatgcagagcacctttaaagatcaaggactgactaaacattgtgattcatggtaaaagagatccagtcaagtcatacccaatataaaccaaaagtaatgaatcaaaatgacagtgttctctccagcgggtgcttttaataagaagggtgatgactcaacataaaagtaaatagataggccctttgtagagggaagcagggatttgtagaggtgccagagctcgattttgggatagagatagaataacattttgagcggcatactttcgctgtcaatgcgacaactatgag

SEQ ID NO: 6516 - DNA, 417 bp, Triticum aestivum
  Clone ID: LIB104-002-Q1-E2-A2
ttcacgggtcgactatcacgatgtacggggtcttgtcgcgaatgatccgcatctccatactcagcgaaaatagccgaacgaagatgtagtgcagcggatgaaggttaaacatagcaaagacgtcatcaaaccgcaggacgatcgtacccccgatgtcgccatccacaaagcccttgccctctggcaccttggccacgaaaaccgggtatgccacatccttctctctgagacgccgcttctccaaagaaagaacactgtcgtgcagactccgcatagcaccggttgcagcattgagcatatttggtggtagcatcgccctacccgccacatgcaccctcctcgagatatcctgcggtgaaggtggcccgtcctgagcacggatcgtactccgtgccggctggctcgcacccttcgtag

SEQ ID NO: 6517 - DNA, 399 bp, Triticum aestivum
  Clone ID: LIB104-002-Q1-E2-A3
ggtccagaagtccagggtggttgccaaggaccaaagtgaggaggtcgccaaggaccaatcttcatagttcttgttcctccacggcgttgtatccgctgttgtatctgatgctcaaagtagatgtcatgtggcggcgccctcccgtgctgcgaaaccgaaactgacttggcctgagtttcgtcgttgttccatgctcccggctatcctagatggtaggtaatgtcggaacacagggggatggtggggcagtgttgttaccatatgatccaaggggtaccttttctttcttcatgctgaaccttgtactgtgtagcttctatgctggtgtttcatgctagtgatttttagcagtaaatgcatgtaacctgactatttgaatgatttgaacaaagttgtgcg

SEQ ID NO: 6518 - DNA, 113 bp, Triticum aestivum
  Clone ID: LIB104-002-Q1-E2-A4
gagtcgtagtagctgatggtgctgttgttggtggtgatgctgttgctgttgctgatggtgctgttgtttgtggtgatgctgttgctgttgctgttgctgcttcggggtttcgc

SEQ ID NO: 6519 - DNA, 89 bp, Triticum aestivum
  Clone ID: LIB104-002-Q1-E2-A5
gctgatggtgctgttgttggtggtgatgctgttgctgttgctgatggtactgttgttggtggtaatgctgttgcagttgctgttgctgc

SEQ ID NO: 6520 - DNA, 386 bp, Triticum aestivum
  Clone ID: LIB104-002-Q1-E2-A7
cccgggtcgacggggagtttatccaggttcgggccgcaagtgatgcgtaataccctactcttactggtttgtgtttatctggtgttcttggactagctacaaagtgtgccgggtccaaaaagttcgaatcctcctccagtacgcctcgggcctccttttaaagccaaaggggtcgccacagtggcacacaggaggtggaaagtttgtactgtatacaagtctatcgcctggcaccgtaggacaaaacacatttaatgcgctgccgacgtgccctcttactttactggggacgacaaggaagctcgtcccatccgccgccgcttcgtctcgctctgacgcgcgtccaggctgactaggcatgcagcgccatgctggttggttgctga

SEQ ID NO: 6521 - DNA, 402 bp, Triticum aestivum
  Clone ID: LIB104-002-Q1-E2-B1
gtcgacggggagccataataataaaactcggatgacaacactttctcaaaataatcataacatgatattacaaaatggtatctcgctagccctttctaagaccgcaaaacataaatgcagagcacctttaaagatcaaggactgactaaacattgtgattcatggtaaaagagatccagtcaagtcatacccaatataaaccaaaagtaatgaatcaaaatgacagtgttctctccagcgggtgcttttaataagaagggtgatgactcaacataaaagtaaatagataggccctttgtagagggaagcagggatttgtagaggtgccagagctcgattttgaaatagagatagaataacattttgagcggcatactttcgctgtcaatggaacaactatga

SEQ ID NO: 6522 - DNA, 348 bp, Triticum aestivum
  Clone ID: LIB104-002-Q1-E2-B11
cggggaattgtgacaaagttgagtgtttcatgggcccctgacgtaaatgatcctcccgttacttctgactcacacacagtgacaccgcagcagagaagttcaatgaagaaccactacaaatactagcccccatatggcagcatcagcagcaaccgcactatcagtggcatcagaaaggacaagaagcattctcaccatagcagcatcagcagcagtaaaagagataagaaagcttcccatcgcagtagcaatggtggcagcagcagaactgacactagtgatcctcaacatcggaaggcatatggcagcagcattaccagcagaactgatactaatgttcctgaatat

SEQ ID NO: 6523 - DNA, 357 bp, Triticum aestivum
  Clone ID: LIB104-002-Q1-E2-B12
cggggaattgtgacaaagttgagtgtttcatgggcccctgacgtatatgatcctcctgttacttctgactcacacacagtgacaccgcaccagagaagttcaaggaagagccactacaagtacaagcccccatatggcagcagcagcagcagccgcactagcagtggcatcagaaaggacaagaagcattctcaccacagcagcatcagcagcagtaaaagagataagaaaccttcccatcgcagtagcaatggtggcagcagcagaactgacactagtgatcctcaccatcggaaggcatatggcagcagcattaccagcagaactgatactagtgttcctgaatatcataagtta

SEQ ID NO: 6524 - DNA, 411 bp, Triticum aestivum
  Clone ID: LIB104-002-Q1-E2-B3
tagccgtcctaaattctagggtccacggggtctcactggtccatatctctttctttagcaacattgaaatcctcttgaacctttagggaatgccgctgcagtctactaaagaaatcaaacagacccaactgctcaactacaaatttcttaggattaatctgtcgcacacatgcacctcataccgaggttaaataattcaaaatgattgacgaagctaaaatctaaagacaacttaagattactgaaaactgcccaaaacaataatatgactgaattgttagatggaaccaaaaaggaaattgtatttatcaagtttattaatctgcatgaactaagacagtctccgatattcaagaatgtagtggctcttgatttttaatcagagataacaaatgaccagatgcgtacaat

SEQ ID NO: 6525 - DNA, 443 bp, Triticum aestivum
  Clone ID: LIB104-002-Q1-E2-B4
attcacgggtcgacggggtctcactggtccatatctctttctttagcaacattgaaatcctcttgaacctttaaggaatgccgctgcagtctactaaagaaatcaaacagacccaactgctcaactacaaatttcttaggattaatctgtcgcacacatgcacctcataccgaggttaaataattcaaaatgattgacgaagctaaaatctaaagacaacttaagattactgaaaactgcccaaaacaataatatgactgaattgttagatggaaccaaaaaggaaattgtatttatcaagtttattaatctgcatgaactaagacagtctccgatattcaagaatgtagtggctcttgatttttaatcagagataacaaatgaccagatgcgtacaatagagggaaggagaagatactcacgtgtgtagcgcgcttgaattt

SEQ ID NO: 6526 - DNA, 188 bp, Triticum aestivum
  Clone ID: LIB104-002-Q1-E2-B7
gacggacggtaccaatgctgctgctgctgctgatggtgctgttgttggtggtgatgctgttgctgttgctgatggtgctgttgttggtggtgatgctgttgctgttgctgttgcagcggcggcagcttctcaaaacgcagaaactgcaacaccaaaaacaccagaaaatggagacagagaatacccaa

SEQ ID NO: 6527 - DNA, 172 bp, Triticum aestivum
  Clone ID: LIB104-002-Q1-E2-B8
tcgacgggacggtaccaatgctgctgctgctgcagatggtgctgttgttggtggtaatgctgttgctgttgctgatagtcctgttgttgctggcgatcctgttgctattactgtcgtctctgcaccgacttatcaattcagtgatcagttatctcaactaacatgaccattt

SEQ ID NO: 6528 - DNA, 412 bp, Triticum aestivum
  Clone ID: LIB104-002-Q1-E2-C1
gtcgacgggagctatatttttattcaccacatgatatgtgttttgcttggattttcatttcattttattttgtttttctttttgtttgaataaataccaagatcttaaattcttaaatgttagagagtcttcacatagttgcataattattcaactactcattgatcttcacttatatcttttggagtagtttgtcatttgctcttgtgcttcacttatatctttttagagcacggcggtggttttattttgaagaaattgttgaaatctcatgcttcacttatattatttttagagtctttagaacagcatggtaatttgcttgggttataaaattagtcctactatgatgggcattcaagatgggtataataaaaactttcatgtagagtgcattgaatactatgaaaag

SEQ ID NO: 6529 - DNA, 161 bp, Triticum aestivum
  Clone ID: LIB104-002-Q1-E2-C12
aactggtaccctgcagtaccggtcgaaatccagggtcgacgggggggggcgcccccagcgggggcgccccccaatgtcttcgaaacggtgttggccccctggtcttcatccttatccaagaattttccttaatttttccaaaggtttccaacgaatttcaa

SEQ ID NO: 6530 - DNA, 75 bp, Triticum aestivum
  Clone ID: LIB104-002-Q1-E2-C2
ggtagcaatgctgcagctgctgctgatggtgctgttgttggtggtgatgcagttgctgttgctgatcgtgctgtt

SEQ ID NO: 6531 - DNA, 391 bp, Triticum aestivum
  Clone ID: LIB104-002-Q1-E2-C3
gtccacggggtctcactggtccatatctctttctttagcaacattgaaatcctcttgaacctttagggaatgccgctgcagtctactaaagaaatcaaacagacccaactgctcaactacaaatttcttaggattaatctgtcgcacacatgcacctcataccgaggttaaataattcaaaatgattgacgaagctaaaatctaaagacaacttaagattactgaaaactgcccaaaacaataatatgactgaattgttagatggaaccaaaaaggaaattgtatttatcaagtttattaatctgcatgaactaagacagtctccgatattcaagaatgtagtggctcttgatttttaatcagagataacaaatgaccagatgcgtacaat

SEQ ID NO: 6532 - DNA, 358 bp, Triticum aestivum
  Clone ID: LIB104-002-Q1-E2-C4
gtccacgggcgcgggcggagacggaggcggcgcccacatcaacctcaaggtcaagggccaggatggcaatgaggtgttctttcgcatcaagagatctacccagctgaagaagctgatgaatgcctactgcgaccgccagtctgtggatatgaaagctattgcattcctgtttgacggtcgcaggctccgtgccgagcagacccctgatgagcttgagatggaagatggcgacgagatcgatgccatgctccaccagaccggaggccgcctccctccacgcgcctagaagaagccgttgagagtcctgcttgttgtcggtctacaagactctgattcatcattagagagcacatgaacg

SEQ ID NO: 6533 - DNA, 420 bp, Triticum aestivum
  Clone ID: LIB104-002-Q1-E2-D1
gtcgacgggttatcttggagtattaccatcttttatgtcaaggatgttgtgaggactgctccacctcttaaagaattcttggtattgtgatacttctcaccctcaccattctttcttggtccgcgtgttgattctaaccgggataccaacacgtgaaccatgctgcttggattctgtacttctagcaaccctattgctttgaagttaatggtcaacatttcatccttagaccattggttattgaatcaccattctaacattgatcctgctacctaagcccatatttcgggtgcacctttcaaccagtgattaattgtgtatgtttccctcgagtatacatcattatatcatttgatctgttaaatgttatctccttgttcacataattgtggaaatccacctttttgtaaatctcaatga

SEQ ID NO: 6534 - DNA, 417 bp, Triticum aestivum
  Clone ID: LIB104-002-Q1-E2-D3
ttcacgggtccacgggcaaaaacaaaggtggtccaaggaaccacaatagtattccaagcactatcctttggcactatcatcctgtacataagcaaggcaaccccagtccccaatctatacctactttgtaaggggagaaggtttcttactgctgaattttcatccgttaatttcgtttgtccatcacggtaaaaaaaaaaaaaaaaaaaaaaaaaaataaaaaaataaataaacataaaaaaaaaatcaaaaaacaaaaaaaaaaatcaacccccataaaaaaaaaaaaaaataaaaaaaaaaaggggcgccccaaaaggttcaagccttacttccccttaaatgcaatttcaaacccctccaaaagggcccccaaatttaattccagggccgtccttttaaaaagtccttaccggg

SEQ ID NO: 6535 - DNA, 360 bp, Triticum aestivum
  Clone ID: LIB104-002-Q1-E2-E2
ttccagggtccacgggtgctaatctcatggtaggtaatgacattacataagaaagattgtaagcagtaaaatttattgaaagttgacaaccataccattggccaaggagccattccagaaagaaatttataagggaagaccagaatcacatgccaatataccgtcctggacctcctttaagaatgtgaaccccaataagtaatttaagtcaaattaatgacgtttgacaacgaagacaacataatgatataagtttgttcaaaatcacacacaaagttactagcacaaagagaccctgtcgttgcaacgggagagaaaacatatcacacactcttaaacccgaaaacatcacccacgact

SEQ ID NO: 6536 - DNA, 442 bp, Triticum aestivum
  Clone ID: LIB104-002-Q1-E2-E4
ttcacgggtccacggggctggtggaagctctatggttatcatgttgcgaaaatccagtttttccctacaacaaaggaatatattttatttaactacaatgtttgttgaaaaacatttagaatggtaaccccatctcaatcccaattaataatcaataaccccacaaattaattaagtaaagtgatgagatcaacatagtaattcaagcaccagacactcaagatgtccataaccggggacacggctaccatcattagtttatacactctgcagaggtttgcacacttttccccacaagactcgatctcctgcattgtatttcacgcactgcatggtgtttgagaaatggatgatctagacacagtctttccgaagaggtccccttaaccgatagataggccggtacacctacaatcccctacatctgctaacccatcatgcg

SEQ ID NO: 6537 - DNA, 450 bp, Triticum aestivum
  Clone ID: LIB104-002-Q1-E2-E6
agtaccagtccgtacattccgggtcgacgggtagattcaaatttccattaaagaaatgcatggagcactttccaagaaataaagtcaaattaccttatgaatctatcatgcgggctacttctgaatcaagtgccaaagatggcactccgttagattaaccttccgctttaggccaacctaggggcgttaaaataatagccctagttgggaggcaacccaattttcttcatgtcctttgttttggtccctgtttagtgttaaattttgtttccactttctatttagatgtgtttttatcttttaattagtgtttgtgccaagtagaacctataggataaactatgatgatagtttatttgattctgctgaaaaacataaacaattcaataaatcacagagacgtacttttgtattgattctttttgctgctgatcaataaacaaattgtcc

SEQ ID NO: 6538 - DNA, 105 bp, Triticum aestivum
  Clone ID: LIB104-002-Q1-E2-E7
gggtaaatccaactttcctcgtatgacgtgcatggagcactttccaagatataaagtcacagttacctgtacaatctatcatgcgggctacctctgagtcaagtg

SEQ ID NO: 6539 - DNA, 425 bp, Triticum aestivum
  Clone ID: LIB104-002-Q1-E2-F2
gtcgacgggtaggcaattgctctagtacttccattatatcttttagagcatggcggtggttataaatagttgcactctcatgcttcacttatatctttttgagagttgataatagtaatgacaattagtgtgggttataaatttggtcctaatgtgataggtattcaagtgggatataatacaaactttcatgtagatcactgaaaatgataagtttgattccttgcaatagtttgcgatataaatgtggtaatatgcgggttgtgctagttagtaattgtggtttagtaagaatattggtgttaaggttcgtgattcccgaagcatgcacgtatggtctctcgttatgctatgaagttgcatcatgatttattattgattgtcatccttatgagtggcggtcagggatgagcgatgggcttttt

SEQ ID NO: 6540 - DNA, 431 bp, Triticum aestivum
  Clone ID: LIB104-002-Q1-E2-F3
ttcacgggtccacgggggctcaacaatactatggaacttcccgacaaggtgaagccagtgcaggaaatcagggaatgcaatcaccctacagatccagttcgtttcctgcacctcagtatgcactgcagagagagaatgtttttcctgagagacctgatcaaccggaatgcatatactacataaagactggagattgtaaatttggtgcagtttgcaaattccatcatccccgtgtgcgttcacagcctcccccagactgtatcttgagcccaatgggtcttccattacgcccaggggaagagctctgcaagttctattctcgctatggcatctgcaagttcggcgtaaactgcaagttcgaccacccgatgggggctccgatgggggtctacgcgtacggctactccgcctcggggtcgcccaacgcgccc

SEQ ID NO: 6541 - DNA, 430 bp, Triticum aestivum
  Clone ID: LIB104-002-Q1-E2-F4
gtcgactgcccggatgccgaagccttagcggccttcaagcacagtgtctgagatgaatggctcgccaaacacctcggccaggaaaagccgaggacaatggcagccttaacaagcctcatgacccgcttttgcgcgggcgaggatagttggctagcccatagcggcaccagtgacccaggaacatccgaagtcagagatggcaacggaaatccgtgacgcaataaaaacaagcgtcgaaacaatgaaaacagcccagataacacgacagtcagtgccggattcaggggctctcgacccggtcaacggaagaagccatttaaaggcagtagagatggaccgtccagcctgaataagattctagacaagttatgtcagattcatggcacccccgaaaaacctgcaaatcacacccatagtgagtgctgggttt

SEQ ID NO: 6542 - DNA, 423 bp, Triticum aestivum
  Clone ID: LIB104-002-Q1-E2-G8
ccgggtcgacggggagcacaagaaggacggcgagcacaagaaggacggggagcacaaggagggcatgatggagaagatcaaggacaagatcagcggcgacggccacggcgacggcaagaaggacggcgaccacaaggagaagaaggacaagaagaagaagaaggacaagaagcacggcgagggccacaaggacgacgacggccacggcagcagcagcagcgacagcgacagcgactgagccagctccggccgcgctccggcagcagcgtgcagtgtaggcgagatcgatgaacgcttgggagaagtgtggcatacatatatgttgcagggtttggagcgtgtggtagcatatgtatgtaatgcgtgacatgtctcatggatcttgtgatgtaaaataattacccggctgcactgcacggcacg

SEQ ID NO: 6543 - DNA, 412 bp, Triticum aestivum
  Clone ID: LIB104-002-Q1-E2-H2
ttgctcaagtttaatagtaaataatttatctagcctctgttttggttgtgttttttgtgtttaattagtgtttgtgccaagtagaaccgttgggaagacttggggaaagtctttttgatcttgctgtaaaaaacagaaactttagcgctcacgagaatctatgccatttttatttggaaggtgatatttagttaattattcttgaagatgattaacagataaattactcacttccagaaatttattttataatttttggggttccagaacgtgcgttagctacagattactacagactgttctgtttttgacagattatgtttttcttgtgttgtttgcttagattgattaatctatggctagtaaaagagttttataaccatagagaaatttggatacagtaggtttaaca

SEQ ID NO: 6544 - DNA, 408 bp, Triticum aestivum
  unsure at all n locations
  Clone ID: LIB104-002-Q1-E2-H4
tagtcgagtgaaaactcacaatcgcaacattaccggaactaagaagcaacaccggaaagaaacaaacaatatggtaaatgcacaagcataaacatggcatgatgcacaaacaagtatgatgcatgtccggtttaatgaggcatggcatggcaaagtgcaacaaacaacactacaaattaagtggagctcaatatgcaacgagttgcatattgacaaaacttcacaacatttatttagtttgctctcttttaggtacgcaataatattaaatgttgttaaacatggcaagaggtgaagcaagagaaaactacctatctaggcaagtttaaatgaggtcggaacaacanacaacaatttccggaaaatcctcatatgcaatttatgaattagctactgttctgcccaaaa

SEQ ID NO: 6545 - DNA, 342 bp, Triticum aestivum
  Clone ID: LIB104-002-Q1-E2-H8
acaaggtgtcgtactctcctcccgagactccactgaggcttgctgatctccacaaccttacaggggtctacaaaacagactttcccacaatgccaagcaatgcgccaccaaagagggcttcatctgtgctgaatgcttcttacaagggcttcctcgagatggtcttccagaacaatgaaacggatgttcagacctaccatctggatggttattcattctttgtagtcgggatggactatggtgagtggacgccaaacagtacgggttcatacaacaagtgggatgccatctctcgcagtactacacaggtcttcccaagagggtggactgccgttctggtct

SEQ ID NO: 6546 - DNA, 73 bp, Triticum aestivum
  Clone ID: LIB104-003-Q1-E1-A1
tgttttgtcagcgtgtcaaaccttaaatacaatctgttaatcgtggatcagatttgttaccacattgggttca

SEQ ID NO: 6547 - DNA, 336 bp, Triticum aestivum
  Clone ID: LIB104-003-Q1-E1-A11
taccatggtcattggcgaagataatactggggaggccaagtggatgatggataacgtaaagttttcagttgaagaaccgattgaggccgtggcaaaaagagaagagctggagcaccttgccatgatttgcagatctgaagctgatgcaatggggaggatcactgctggaattctccgtctgcttaaacttgataagtctcttgggcagggaaccatcgaacagctgaggaacctaggaagtggaagcctggacaacattttctcgcctagcaggttcagcaggcacaacagttttggcatcgtaagcacccctaggacccccaggagcccaatgtt

SEQ ID NO: 6548 - DNA, 227 bp, Triticum aestivum
  Clone ID: LIB104-003-Q1-E1-A12
gtcgacggggaagaagatgaagaggaagaagaagaagaagaagaggaagaagaagaagaagaagaagaagaagaagaagaagaagaagaagaataagaagaagatgaagatgaagaagatgaagaagaagaagatgaagaagaagaagaagaagattaagatgatgtagaagaagttgtataagaagaatgaagaagaagaagatgaatttgattatgatgatgttg

SEQ ID NO: 6549 - DNA, 337 bp, Triticum aestivum
  Clone ID: LIB104-003-Q1-E1-A3
ggtaaagaaaaagatcaatgatgcaggaaggaggaccaaggccgagatgatgaagactaggataaggatcaccttgaggaagaagaggacgagtaagaggacgaagtcgatgacctcgagctgaacttgacatctacgacgactccgttgagacagctcagcgtgcgagacttgacgaggttgaagcaagccataaagagtgcgatcgttaggatcatctacgggagaaagcgtgaggaccagtcaaggcagagtagaagaagaatcggctgatgaagacgaagagtcttcaatagaagaggccgagtcgctataccggatgcaagaagatcaggtg

SEQ ID NO: 6550 - DNA, 413 bp, Triticum aestivum
  Clone ID: LIB104-003-Q1-E1-A4
aaagaaaaggaaaacccggtgggattccttttaacaaattccccaataacaagcaaaaggccctccgacctttcccaaaaaaccttgggaatccggtggcataaaaggaccaaggaaagcccaaaggcaatgaaccatcaaaataaactttccccgaacaaaatttcaatcaagcttcaaaaggacgaaacataacttacaatttggaagcaccaattggatcgtgatgttgaaacccttaaagcaaaatctaacatcggtagcaatcgtacgtttttgaatcgcagtgcgatcgaatgcagtgaccttgaagaattattcattaaagatcagtcactgactaatgaaaatgtggacaagattgtcgggtacgctgtcagttatcatcttaagcacaataaagtcgaaacctc

SEQ ID NO: 6551 - DNA, 400 bp, Triticum aestivum
  Clone ID: LIB104-003-Q1-E1-A7
gggccgacggggcaggatatacatcgatgatgcaggatggggtcccgaggccgattcgatcgagtatgggtaccgggtccccttgggcagcatacacgtcttcatcggcaagatcggtgagcctaggcctgagctggacatctacaccgaccccgtcgagacggctcagcgtgcgagatctacccaggttaaaccggccatgaagcgtgccttcgttggagtcatctacggaggagagcgtgaggacgaatcagagcacggtaacgagaccgtcgtctattccggcgacgagtcttcgaccggagagaccgagtcgctataccggatgcaagacgatcaggtgaggggttgttccgatggcgacagtattccggaccccccaaggccagatcgaccgggt

SEQ ID NO: 6552 - DNA, 297 bp, Triticum aestivum
  unsure at all n locations
  Clone ID: LIB104-003-Q1-E1-A9
cagctgtgatatacatcgttgtagggtangtagctcctggagtcatttgattccagtgttgtaggaaatggcgcgatggatgggttctaggagtttttcttttggacgggggatgtacgaaactgacttgcgcgcgtctctccgctcgtgggactcggggaaacagtgttccccttcgaactgttgtcctgtaggttttggactagaatttggaagatttatatagagaaaatgcactggcggtacttgaacttgaaaagaaaaatataacaaaatctaaaaaaaaaaacgcggccg

SEQ ID NO: 6553 - DNA, 429 bp, Triticum aestivum
  unsure at all n locations
  Clone ID: LIB104-003-Q1-E1-B4
cgggtcgaccggagcgccatagtatctgtgacatttacaggcctgccccgaagaagggaaaggcatgttcaaccaataatataacaagggaaatcaattttttccgggtaaaactaaaacaataatgccaagaaggtaaaaagttaagggaagggttttatccgaaaaaattgcaaattttccccaatataactgcaaccaaaagctgctgccgttgtttggtgttaaaatcaaagttactgccagaatggaattgtatcgcctggaaatcaatcttttttgtttctccaaaaaaaaaanaanaaaaaaaaaaaaaaaaaaaaaaaaaataaaaaaaaaaaaaataaaaaacaaattaaatttatataaaataaattaatataaaaaatatcctaaaattaaaattaaaaaaaaaaaaaaaaggggccc

SEQ ID NO: 6554 - DNA, 176 bp, Triticum aestivum
  Clone ID: LIB104-003-Q1-E1-B9
atggattttgaaaaccatgaaatttctgaaacaaagaaaattcacctaaggactcatcacgatgtggactttgaagtaattctatataattctgagagcgtaacccattttggttgcaaaaactgggaagcattttgcaagatgtatggttttgatgaaggtatgcttatcaccat

SEQ ID NO: 6555 - DNA, 276 bp, Triticum aestivum
  Clone ID: LIB104-003-Q1-E1-C1
gggtcggccggttggtagttttgatcacagtgcttcacttatatcttttgagcgtgataatttttgctctagtgcttcatttagatcttttagagcatggtggtggatttgttttaaagaaactattgatctctcatgcttcacttagattgttttgagagtcattaatagcatggtaatttgcttaaatattaatatacttggtattcaagatatgtgaaactttcttttgagtgcgttgaatactaagataagtttgatgcctgaaaattgttt

SEQ ID NO: 6556 - DNA, 321 bp, Triticum aestivum
  Clone ID: LIB104-003-Q1-E1-C3
cgggtcgaccggcgcgagcccagaggcgttccagcggtcatccgccccgcggtggagcccgcaggtgggcgactcatccgacacgaggggccggtcgtcctcgggcaggcaccagtcgtcgagcgccaagaactacgagtccacggtgcggggcatccagggcctcaactttgacggcgacgacaccaggaaccactactaggccccgaggcggcggcggaggaggccgggcaaaataagaggtgtggcctggcaagggtgtctcagccaggcagtggctaccacgggcgggcgtgccgtggtctctttataacgaatgaa

SEQ ID NO: 6557 - DNA, 347 bp, Triticum aestivum
  Clone ID: LIB104-003-Q1-E1-C8
aattcgccggtcgacgaggatacggtcctctcagccgcagaggcccagggcttcaggctcgtggacaaatggataaatggagtgcacgagagcaatggtatcattagctcttggttccgtggcaatgacgtttgcggtgctttccggaatgtaacgctttccatattgtactttgaagtgtgatacattggtgtttacctgcatctcatggttaacttgcaggttttgttttaccttcctgcattggtgtaccgaatgaatgtttttgtatactaaaaggaatgaatgtggcagttgtatactaaaagaatgttatttttttaaaaaaaaaaaaaaaccaacaaaaa

SEQ ID NO: 6558 - DNA, 363 bp, Triticum aestivum
  unsure at all n locations
  Clone ID: LIB104-003-Q1-E1-D4
cgggtcgaccggcgcggggcgcaagtgcacgtggccaacggcggtgggctcaccatccagcaccagaacaacgtcatcatcaacaacctccacgtgcacggcatcctacacacgtcgggccgcaacgtgtcgatgacggcaacccactccaagattcgtacccgcgccgaccgcgacggcgtctccatcttcaacgccaccaaagtgttggtggaccacctgtccatgggtaattgcgatgacggcatgatcgacgtggtggccatgtccacggccgtcaccgtctccaacacccacctggcccaccacaacgacgtgatgctcttcggcgccaccgatgggaaggangangacaaggtgatg

SEQ ID NO: 6559 - DNA, 363 bp, Triticum aestivum
  Clone ID: LIB104-003-Q1-E1-D6
cgggaacactaaagaatcaaagagatcactggccagctttcatgaaattaacggaatcagaattagctaagtgaacggccgatgaataaacactatcactgccatgataaagaggattaccataggctggggccaagtggctacatggtggcccggcctacgcgggataaggctgagcaagagatgctggatgcacgggtcagtccagttacattgagctggctccccaggtgcaggacttggttctatgtgcatgggggagcgttggccccaacgacagccaaggttttgaacaacgcaagccttaaaggagcccacctaaaattacttgttgcaatagaataggctcaaacaagggttttc

SEQ ID NO: 6560 - DNA, 435 bp, Triticum aestivum
  Clone ID: LIB104-003-Q1-E1-E3
gaatgatagaagggtgagagtgcgtattgtcaagggactcaacattagtcataaagaactcatatacgtattgcaatagtctaaaagccattgctcagaatgtattacgcgcatgctcctagtgggatagattggtaggaaaaggccatcgctcgtccccgaccaccactcataatgaagacaatcaatattacaattgtgctccaacttcatcacaaagcggttcaccatacgtgcatgctacgggactcacatacctcaacacaagtatttctactaatccacaatcacccactagcataactctaatatcaccacctttatatcgcaaaactattgcacggaatcatacatatcatactcagcgatctacaatttgatgtacgattttatgactaatcatgtgattgaccaattcctgtcatctctccatat

SEQ ID NO: 6561 - DNA, 427 bp, Triticum aestivum
  Clone ID: LIB104-003-Q1-E1-E9
ttccgggtcgacggggtgtgccgacggcgggcgcccctggtccaatggtgccgccgccggcatctcctgtcccatgccgctgacggttcctcctcccactttgctcaaaatcgctagggagcacatcgccgccgtccggcccttttccattgcacaacgacatattttttttcactgcaccgcccagccatctcatcttccctcaagatcttgtatgtcgtgttgcgagatcaagtaacgtctccccaccaaaggaattgagtatggaggaggcgaggacgtgttcatctcccgctccggcgagattcagttctgctcttgggtttccacgacatcatgaagttcctttgtgtagacaagcacctcagcactctagatcgataatcctaatacttcaaagccaaggagtagaaaaactgaaacgacg

SEQ ID NO: 6562 - DNA, 87 bp, Triticum aestivum
  Clone ID: LIB104-003-Q1-E1-F3
accctaaagtagagtcgtagtacgctctctcactcagcagcttcatcccagctgcgaatcttgtgcacattggatattcactcatat

SEQ ID NO: 6563 - DNA, 456 bp, Triticum aestivum
  unsure at all n locations
  Clone ID: LIB104-003-Q1-E1-F4
cgggtcgaccggggacgtgagtgtgcaggacgcgcagctctttgacgtcttcagccaggtcggctcggtggtgtctgtgcgcgtgtgccgggacgtcaacaccaggatgtccctaggctacgcgtacgtcaacttcagcatccctgccgatgctgcaagggcattggaaatgctgaacttcactcctgttaatgggaagcctataaggataatgtattctaaccgtgaccccagctcacgtaaaagtggtgctgcaaatatatttatcaagaatcttgacaagtcaatagataacanagcgctctatgacacattttctgcctttggaaacattctttcatgcanagttgctacagaaatgtctggagaatccaaggttatggttttgttcagtatgagcaggaccaatcaacacagaatgcaatcaatgagctcaatgggatgcttttgaatgac

SEQ ID NO: 6564 - DNA, 282 bp, Triticum aestivum
  Clone ID: LIB104-003-Q1-E1-G11
gggtcgacgggaagaacgagcgccgggcgagcaccaaatccaggggcgagaagggcttcatcgagggatgcctcgccgcactgtgctgctgctggatctgcgagatgtgctgcgactaaccggccggccggcgaggccgctgctggctggcacaagacctcggtgctatagtacccacgaggaggaggagcgtatgcgtatacagagagagaattgttcttaatttcagtgcccgttgttttaggttctatacagtatatactcctaagttgatgcatgcat

SEQ ID NO: 6565 - DNA, 311 bp, Triticum aestivum
  unsure at all n locations
  Clone ID: LIB104-003-Q1-E1-G3
actcactggcctcatccatgatttgngcaaagtgctgctgcattccagcttccgggagcttcctcagtgggcagtcgtangtgacacctttcccgtcngctgcccgttcgacgaatgcaacgtcaacttcaagtacttcaaggagaacctgactaccacaacccggagttcaacaccaagttcggggtctactccgangngtgcgggctggacaacgtgctcatgtcatggggccatgacgactacatgtgcctggttgccaaggagaacaagaacacccttccttccgcanggctgttcatcatcagata

SEQ ID NO: 6566 - DNA, 104 bp, Triticum aestivum
  Clone ID: LIB104-003-Q1-E1-G4
cgggtcgacggggaacgtaatcaccatcttcgaagaggaaggcagacggccggacgccatcatgatcctgacggtgaagccagacaacatctgcagcttcatct

SEQ ID NO: 6567 - DNA, 403 bp, Triticum aestivum
  Clone ID: LIB104-003-Q1-E1-H12
cgggccgacgggtcatggcaaactcccaaggcaccccagggtaatcttaaaggacaaccaaaagcctaagcttggggatgccccggaaggcatcccctctttcgtcttcgtctatcggtaactttacttgaggctatatttttatgcaccacatgatatgtgttttgcttggagcgtcttgtatgatttgagtctttgcttttagtttaccacaatcatccttgccgtacacaccttttgggagagacacacatgaatcggaatttattagaatgctctatgtgcttcacttatatattttgagctagataattttgctctagtgcttcacctatatatttttagagcacggtggtggttttattttatagaaattattgatatctcatgcttcacttatatt

SEQ ID NO: 6568 - DNA, 418 bp, Triticum aestivum
  Clone ID: LIB104-003-Q1-E1-H6
gacgggaggttcaagggagagaagcgacggagttagaagttgtaaatatgcattgttgtatcgcgacctgaatgaaataaacgaaataatgctcttgttcaatcgtcaaaaaaaaaaaaaaaaaaaaaaaaaaaaaaaaaaaaaaaaaaaaaaaaaaaaaaaaaaaaaaaaaaaaaaaaaaaaaaaaaaaaaaaataaaaaaaaaaaaaaaaaaaaaaaaaaaaaaaaaaaaaaaaaaaaaaaaaaaaaaaaaaagtgagcccacaaaaaaattaaatttaaaataaagtgaaaagaatattaaaaaccactaaaaagggcccactaaattaaattaaaagggctttattaaaaaactgcaaaaagggaaaaaccttgggggaaacaaaataaaacccctataaaaaaaacccccttt

SEQ ID NO: 6569 - DNA, 302 bp, Triticum aestivum
  unsure at all n locations
  Clone ID: LIB104-004-Q1-E1-A1
gttatacaccatgacttcaaggcccaaatatttgaacaaaaccttgtcatatatataccacaaagccattatgagtatatatagattattgtataaggttacccaatagatgaagaactaattcatcagctcaacctaacctgggtacaaagctaattcatcagctcaccagtgatcatgcgtgttgctgaatatctcatctatgtgcgtgttgtgtaatgagattaatgtgggaatacatcatgggcggagtcaggattcgaaaaanaaaannnannnaaaaaaaaaaaaagcgggcgctc

SEQ ID NO: 6570 - DNA, 424 bp, Triticum aestivum
  Clone ID: LIB104-004-Q1-E1-A10
gggtcgacgcgaatcgtcgatgtcactggatccggatttggccaagttcctggcacatggcacttcaggtgcacgatccttccgcaggaggagaagatcccggcaatcatctcccgcttcacggtgttccatgagacgttcatggcagagtaccgtgactaaactggtgtaacatgtgtgggattacatgcaagcctcatggattttccctaggcgtttttgcccgcgttgacagcagtatcctgtagatgagacaaaataaagcaaatccatggcttgtgtgtgtgatactatatcagattaccagtctgatgcctttgatggtaaattggcaactgagaatttttatttcaaaaaaaaaaaaaaacaaaaaaaaaaaaaaaaaaagaaaaaaaaaaaaaaaaaaaaaaaaaaaaagcggccg

SEQ ID NO: 6571 - DNA, 302 bp, Triticum aestivum
  Clone ID: LIB104-004-Q1-E1-A11
aaacgcaggaaaaagtgagcgagtgggagacatcaggaagcgacggagtctcagctgtgtgtacatgttgtagggtaggagctcctgggtcttttgattccagtgttgtaggaaatggcgcgatggatgggttctaggagtttttcttttggacgggggatgtacgaaactgacttgcgcgcgtctctccgctcgtgggactcggggaaacagtgttccccttcgaactgttgtcctgtaggttttggactagaatttggaagatttatatagagaaaatgcactggcggtacttgaacttg

SEQ ID NO: 6572 - DNA, 363 bp, Triticum aestivum
  Clone ID: LIB104-004-Q1-E1-A12
ttctgggctctcccccctctcttcgggtaacccccaggtttggcaaccgggtaaccggttaaaatccccgcccccttgtttcgcggtcctctcgttggttgtaatctccaggcaaacgttcggtttgggttgtgctgccccttataacgttgatgtccatcgaggccaatttccggtggtttgtcctcctcggttccgttgacgttgggaccgtcttctgaacctccctgctttggtttaagtcccggctaatctattttgctttgacttctgatcctgattgggtccaggctaaacccatcatgctctgattgccaatatgttttatggtcctgggctaaccatttttaacccaaatgccga

SEQ ID NO: 6573 - DNA, 403 bp, Triticum aestivum
  Clone ID: LIB104-004-Q1-E1-A3
accggaagccgaagccgtcccacggcgacgacgaccggcccagctacggccgcaagatgaacgacgacgacgacgacgacgacaggcggtcgcggtacaaaaagcgcgacgacgacgactatgatgagaggaagccgcggtacaagaagcacgacgacgacgatgatggacacgataggaggccgcggtacaagaaacgtgacgacgacgacgatgatgacgatgacagaaagccacgttacaagaagcgctacgacgacgacgacgatgatgatacgaagccacgttacatgaagcacgatgattatgatgacgacgacgatgataggaagcagcgtcgcgggaacaaccgccgccgccacgatgacgatgactgattatgacatgagtttaagctgacgct

SEQ ID NO: 6574 - DNA, 412 bp, Triticum aestivum
  Clone ID: LIB104-004-Q1-E1-A5
cgggtcgactgcacacagcaccgtcataccatttgacgacaacataaacttccacaaggttatcgcggttggaattgcaattggagcgggtatgcatacggttgttcacctgacctgcgacttcccaaggctggtctcctgcccaagtgacaagttccaggagaagctggggcccttcttcaactatgttcaaccaacatggggaactctgttcgcgagcactccagggtggactggtatcctcctggtcctcataatgtcattctcctttacactggcgacaacctccttcaggaggagcgtcgtgaagctgccatcgccactgcaccacctggctggcttcaattccttctggtatgcccaccacctgctggtgtttgcatatatccttctggtgatgcactcctactac

SEQ ID NO: 6575 - DNA, 335 bp, Triticum aestivum
  Clone ID: LIB104-004-Q1-E1-A9
ttcacggagccggtgtactatggcgtatctcttgtcataagggcaaattactttaaaatgttgggaaagagctcctgggtcatttgattccagtgttgtaggaaatggcgcgatggatgggttctaggagtttttcttttggacgggggatgtacgaaactgacttgcgcgcgtctctccgctcgtgggactcggggaaacattgttccccttcgaactgttgtcctgtaggttttggactagaatttggaagatttatatagagaaaatgcactggcggtacttgaacttgaaaagaaaaaatcaacaaaacataaaaaaaaaaacgcggccgc

SEQ ID NO: 6576 - DNA, 328 bp, Triticum aestivum
  Clone ID: LIB104-004-Q1-E1-B1
ggaagatcaagctcaaggcggaaggaaacccccgccgcgtcggtagacgagataatgccgcggaaggcattggcgcattcatggtttagatatgaaagttttggacaccgaccggaactcagtcgagagcttatatatgaaaactagtgagagagagaagactatatttatgcaattagaagagaactatatacattgtttttcccctaagctcaataaggtctgtgtcctttgtggactgcgtttcttctttgtagagacagaacatataatactgaggattgcagtcaaatggaaattaaattcaggtttgatactttaatatacc

SEQ ID NO: 6577 - DNA, 265 bp, Triticum aestivum
  Clone ID: LIB104-004-Q1-E1-B2
gggccaacgggaaggacaccttgtggccccggtgaacaagttaaaccgacgttaccaacaagccaactcaacttcggggtcctgtaatgcaagcatgcatgcacaaataaatccttcaagttcaagggccaagatttggaccaataattcaactccttggttccaaataacccaatggataattaaatccaatacaaccaaaatccaataacctttaaattgccccattatacccaaaatgatgttttccacgagcacatatgat

SEQ ID NO: 6578 - DNA, 334 bp, Triticum aestivum
  Clone ID: LIB104-004-Q1-E1-B3
gggccggcccgagcagttacgaaagcgaatgaagctgcggttgcacggacaagcttatggaggtgtcagtatgcacgcacacgtccctgatttggagcacgcctctggcctggtaggattctcgctctgcctcgacctcaagggcgttcgtctatctgtgtcatgctcgggacgatgcactaatgcagggtgtggttcttcagattttctttgtctttttcttggtatgtatatctctgaatcttgtgagccgtgattttcatgctgcccattgtgtcatgtataatgattcttcttattatttttgaatggcataattattcttattgaggcg

SEQ ID NO: 6579 - DNA, 449 bp, Triticum aestivum
  unsure at all n locations
  Clone ID: LIB104-004-Q1-E1-B4
gggccgacgggatattttaatccgcaaaagaaaaggggtttggcttgaaccgcctggtataaaattaaccttggcttttaagttaaccacaaccatccttgcttaatacaccttttgggaaaagcctatttgattagaatttcaagaatacccaaggtgcttcacttaaaccttttgagcttgatagtttttgctctagtgcntcacctaaatcttttagagcacggtggtgactttattttgaagaaattactagtctctcatgcttcacttatatatttttgagagtcttttagaatagcatggtattttctatggttataaaattggtcctagaaaggtaggcatccaagttgggtataataaaaactatcatangaagtgaattggatgctatgatcaatttgataattgataattgtttggagatatggaggtantgatataaa

SEQ ID NO: 6580 - DNA, 430 bp, Triticum aestivum
  Clone ID: LIB104-004-Q1-E1-B9
attcccgggccgacgggggtgcagaacaaggacgaccctaccatcttggcgtgggagctgatgaacgagcccagatgcatcaccgatccgtccggtaacactctgcagcgctggatccaggagatggctgggtacgtgaagtcgatcgacaggaggcatctgctgaccgtcggcaccgaggggttctacggcccgacgagcccaccggagaagctcagcgtgaatccggggcactggttcaacaactacggcctcgacttcatccgcaactccaagatctctgacatcgacttcgcctccgtccacctttacccggacacctggctgctgcacgcgaatttggaagagaagctcaagttcgtgacgcagtgggtgagctcccacttcgaggacggcgacacggagctcggcggcaagcccgtggtgctca

SEQ ID NO: 6581 - DNA, 386 bp, Triticum aestivum
  Clone ID: LIB104-004-Q1-E1-C10
ctcaacaaccaacgcgaacaacggaaagaagatggcgcaatccgtcctccggttcctccaacaaaggtacaatgcaatccgctcccccaagaaaggccgttaatttaacaatccgctggcaacggaaagccaacctcccgtaaattcctcgccgtccttgctggccactttcgacagccttgacatcttggacgcctgcaatggcctcctgctctgccgctgctggaaggctgctgatcccctggaattggattatgttgtttgcaatcccaccactgagaaaatggtgtccttccctgccatcgactggtccagcaaagtgagcgtcgctcgcctcggatttgacccggccgttacttcccacttccatgtattcgagttcatag

SEQ ID NO: 6582 - DNA, 430 bp, Triticum aestivum
  unsure at all n locations
  Clone ID: LIB104-004-Q1-E1-C12
gggccaaccggaagttgaaggtaccggtgggtggcctcccaatcaatcaaggaaacaatttggaatggctaacggggggtaatggttaaccgggaatcaataaggaattggtgacaaaaaaaccattaaaggcattagaattacctaaggagcaaaaccaaaccttgtggaggatcccatcaaccctattctcgcacattgcttccgatgcgacgcttaagccattgggccactttgctgaagcacccaatgctcatagttatccgcctatatgtgccggggagtatgtggaacaagagctctcggcgatcaatctgaaagggaaggttgcactttangtgcacacagaccgccgattaatctggtgacttggtgactcgttggtctgccttctatggtcagaatgcgaattgcgataatccaagctgat

SEQ ID NO: 6583 - DNA, 434 bp, Triticum aestivum
  Clone ID: LIB104-004-Q1-E1-C2
gggccgaccggaacccaaggggatccactaaaacctttgggccaaaaaagtttgccccaatggctcaactaaaaattttaaaacaacggcgggggtttaatttgccaaaaccaatggtcccccaagcctcaactaaaataatttgagagtcctttaaaacaacaatggaattgctaaggtttaaaaattgggcccagaatgatgggcatccaagtttggtataataaaaactatcatagaaagtgaattggatgctatgatcaatttgatgcttgataactgttttgagatataaaagtggtcatgttagagtcatgctagttgggtaattatgaatttgagaaatacccgtgttgaagttggcaagtcccatagcatgcacgtatggtaaaagttgtgtaataaatttattgcatggggtgctcttttgattg

SEQ ID NO: 6584 - DNA, 442 bp, Triticum aestivum
  Clone ID: LIB104-004-Q1-E1-C9
ggtaccagtctagaatcccgggccgacgggcggttggagccaccaaccgggactaaagggcctcctgtctgtactcgcagcaccggccacgtggaggcccatctgtcccggttagtataagaaccgggacgaaaggcctaggcattggtaacgaccctttagtcccggttccccaaccgggacagatgggccttatgaaccgggacaaatgaccctttttctactagtgttacaaagccagtaggtcacactgaatttttgatgtgatatggccacagctatcatgttgtaatatcttctaacctgaacacgatttatacaacttgaatttaaaatgttacattaacggatacaaaaattagctgatattccctgtaattttctcttttctttccaaaaaggttgtatttttgcaagcacttctgcttattattaactggta

SEQ ID NO: 6585 - DNA, 358 bp, Triticum aestivum
  Clone ID: LIB104-004-Q1-E1-D11
cccccgttctccgactgggcaacctccccgtggtcctgggggtccccaacccgcaacaattccaaccccacaaaaccggacccggcaaccccgaacctgccttaaggcttaaaaggccaaccaccggatgaaggagaactttttcaaggaaaccttaaaattgaaaaaaatggacttttagggtggatcaaaaaggtaggaacctccggcaaaattgctactgcaatttggcagctttggggtttgcggcttacttacactgctgtttgtgtctctgactttttctgctctgagtttaacacaaaaaatatgggtgcgtctagtgctcactggactcgcagctagcgtccgttgccat

SEQ ID NO: 6586 - DNA, 446 bp, Triticum aestivum
  Clone ID: LIB104-004-Q1-E1-D2
gggtcgacttcctcagcaccaagtttggggtgcctttcctgccaccgtccaaggcgaacggcacggacttcaagcacggcgcgaacatggcgatcacgggcgcgacggccatggacgcgcccttcttccgcggcctcggcctgtcggacaagatctggaacaacgggcccatcagcttccaaatccagtggttccagcagatcaccgccaccgtgtgcgggaacgactgcatgcggtacctgcgggactcgctggtggtgttcggcgagttcggcgggaacgactacaacgcgatgctgttcggcaactacaacccggaccaagcgagcaggtaccaatgtttcaacggttcgaacggagtgccgctagctaaatgaaatcctgtccgcgctatagcctgatttttcaccggcatatagccgatttggatgagtagtaccgctact

SEQ ID NO: 6587 - DNA, 425 bp, Triticum aestivum
  Clone ID: LIB104-004-Q1-E1-D4
gaccttcaaaaccggaaaaaaggatcccatacagggggcaacggcaacgacaatgggaacagatcaagggaccacaaccgtgaccgctacaaaaaccggacccgtgacagaaagaggccctattaccagggaggtagagggtcggactatataggcggttcctataacagccggagggattctgaaagggcaaggcccacagacaggaacggtggtgatttttcaagaacaggagacccggggaggatgaggagcaggtctcggtctccgggcatgcatggttattaatcatttcaagttatatgagactcgtgaggtaaacattatgctcctttgtttattcattcagtcgcaatgtctgggtgttgtcatgattaaatttaaaccttactctgctctagcagctctttgttgaaaccatacct

SEQ ID NO: 6588 - DNA, 238 bp, Triticum aestivum
  Clone ID: LIB104-004-Q1-E1-D6
ccggccgacggggaaaacaatgaccgtccgtacgacgacgaaggatagcactacagcggccaccgggatgaccatgaggagagatccatagatcagcaccgtcagtgctgtaatcaccggatgcctgtcacgctgatgtccgattcaccttgaggtacagggtcgcactctcctggctgttcctatcactgcctgatggattctcatggggcaacgctcaaagacacgaccggttgtg

SEQ ID NO: 6589 - DNA, 308 bp, Triticum aestivum
  Clone ID: LIB104-004-Q1-E1-D9
ttgagaaacgaatgaccgagacatagtttttcagaagcgctagcaccttacgatcgggtagacagttacacctactttcccctacatctgctagtctaccactgtaagagttcacatgacttaatcaactatgctagatcccatagtagcttgcggctgcacacggaagtttctagcatgaataatttcatgatccctttgagcctgggtggcggtccataaagaaaacgaccaatcgctggaatacccaggtgcctcaatccacccagatgtgtgttaaagttgccaccttaaataaactattaaat

SEQ ID NO: 6590 - DNA, 319 bp, Triticum aestivum
  unsure at all n locations
  Clone ID: LIB104-004-Q1-E1-E10
tgaaggcctctaaagtaaagaaagaagaaaccggttctgatgatgaatgcaagccaaaatctcagaagagaagtccagctgcgggcaaacccaagatttccaagattaagaaaccaaaagatgaatatgatgatacaaaggaggaaaagaaaataaagaaggaagttggtatcaagaaagatgaaaagaaggctgctggggtgaagaaaganggggctgctggggtgaagaaggagaggaaggtgtatgaattgccagggcagaaacatgatcctcctcctgaaagggatccattgaggatattttatgaatcgctcta

SEQ ID NO: 6591 - DNA, 314 bp, Triticum aestivum
  Clone ID: LIB104-004-Q1-E1-E11
ccgggtcgacaagaagaattctgcaatgcttgtgaggataacgagtgttagaatgcgagattcgctaaaccatgtacaaggaaatgatttgggtgcgggatggattgatcaccataccgacttactcttattattcgctttgctatatgggatggtaaatctgagtgacttacctatagtggagagacgacgatcaaaaccttgtttgaaccttaaaaaggtacaggtattttttttcccttgtacacggcagttgttgccaaccgtaggttaaacggtgaggttcaacccaaaccctttcctgcaggagaaac

SEQ ID NO: 6592 - DNA, 427 bp, Triticum aestivum
  Clone ID: LIB104-004-Q1-E1-E12
gggccgaccgggcttggtaggtatggtttggagggtcctaacaagggtcctcctgtggggaattccccgggaaaatgggggctttcctccaatccttggtgccttgggttaaccggaaaaacccggaatggattgccggcacaattggcgggaatttttgcagtagtccctttcgtgctcaagggcaaaagaatgcgtccgttcttttttttgagagcgaatgcgtcctttctggtgacgctgggaactgggaagtcgtcaatccagattcttaacggccttattctgtcatgctggaagtcggcaatccaaacccacatgttcctcaccatatttgtcatgtccatagttgtactatatacagttcatccatgtgaataacacaatcgattatcctaaaaaaaaaaaaagaagaaaggagaaaacg

SEQ ID NO: 6593 - DNA, 440 bp, Triticum aestivum
  Clone ID: LIB104-004-Q1-E1-E2
cgggtccgacgggtgacaacgtgaccttgcaggtgactcgggaccgcaaaatgacaaactggccaaatcccaaggtcggcccggttaggcccccaggttccccaagaccacaggaggaagggtggtggctggtggtcggcgacagctccaccaagcagctgctggctatcaagagggtcaccctccagaagatggcccgtgtgaagctcgagttcaccgccgccgcggagccagggacgaaggactacatgatctacctgatgtcggactcgtacctcggctgcgaccaggagtacgagttcaccatcgacatcaaggaagctggaggcgactaatttcaaacacccaaaactcttttttatactgggtttttgctcttatgtagacaatattatgtgacctggaacttatcatctttttgtctgtaatgtaacacctga

SEQ ID NO: 6594 - DNA, 422 bp, Triticum aestivum
  Clone ID: LIB104-004-Q1-E1-E9
aacgggttccacaaaaaacatcaagttaagattggcaagttcaaaaccccgaaaattggacatcctaataaagctaatcaaccatctctggaacttcacaacaccaacaaatggaagcaagcaggacgaaacctacactgagcaacctggagtctttccatgttggcaagcaccacaatttccgtgtaccgacctgccagcgaagccccggcacagcaagtatccctggcacagcaagcaccgattagcattcaggcatgagtaaccaagtgtgtccgagcccaggagcccaaatggccctgcgcaccgagagcccatgagcccaaatggccctgcgcaccgagagcagcccggactgtatgttcacagccagaaactattatactggaactcaattgccaacaaacctcccaagaacaaaa

SEQ ID NO: 6595 - DNA, 205 bp, Triticum aestivum
  Clone ID: LIB104-004-Q1-E1-F1
cccgggccaacggggcagaaaggcgaaatcggtggccttttgcaagcaaaaagcaattcctgataaacaagccaatggtccccctagcccaacaaaaagctctgctttgtttaagtcgggccagacataaatgggcctccccaaagaagttacgaacagaccatagtgtgagaaatcctataaagtttctttatttaacctgcgc

SEQ ID NO: 6596 - DNA, 426 bp, Triticum aestivum
  Clone ID: LIB104-004-Q1-E1-F11
cgggtcgacgggatgacggaaggctcgccatacgcgcgcggcaaccagcaagcggaggatggaggagacatgtgtcggagtcccggtgaccagcaagcgaagagccgatgggacagcgtcgtctgtgcgccgcgaccacctagcggggaggagctagatcggggaaggtgccgtcgccaggtggtcgaggaatcgggcagcaaagtgccgaaaaaaacgtggagctggagaggccgttggggaggaggaaacttacattctaatgcatgaggcgccgggagggaggtgctgagcggttatgatcggcggtaggatcctgcgccatgtgcgatggtggttaggaccctttctttccttttttgtatgacagctggcaaaaggtgcgggacaccgctgccatatttaggtgtgtgctccggaacgcta

SEQ ID NO: 6597 - DNA, 446 bp, Triticum aestivum
  unsure at all n locations
  Clone ID: LIB104-004-Q1-E1-F4
cgggccgaccggaaggttaaaaacctgattggaaggatattgaattggctgaagcccggtgggcatatttccatcagggaatcgtgcttcaaccagtctggggattccaagaggaaagtgaacccgacgcactaccgggagccgaggttctacaccaaggtgtttaaggaatgccactcctatgaccaagaggggaattcctttgagctttctctggtaacttccaagtgcattggagcttatgtgaaaagcaagaagaaccagaaccagatatgttggctgtgggagaaggtcaagtgcacagaagacaaaggctttcagagattcctggacaatgtgcagtacaaatccactggaatcttgcgttatgagcgcgtgtttggggaaggttatgttagcaccggtggattcgagaccacanangagtttgtggacaagctggacct

SEQ ID NO: 6598 - DNA, 408 bp, Triticum aestivum
  Clone ID: LIB104-004-Q1-E1-F6
gacgggcaaagtgagcttttctcttgttaacgtgccgcgccgtgattttgttagtgttctaggctcgcgtctctagcacagtctagcctaggaccagcacagtaccgtcgttgagcgtttattcaactttgcatttctgaattgattattgctgaccatttttgctaccatattataagccttcccagctccacatacatctacgtcgtgcggttgactctccctagtaatcgctctatccaagctttgagagtttttgactacaacgattgccgatcaccgcctgctgctgggtaagaactggtaagaatttgagatttgcttgacggatttgtgacacccaccaccacctcttggtagtagtctgtaggattatattcttgtgtgtctctattgctgctaaccatg

SEQ ID NO: 6599 - DNA, 416 bp, Triticum aestivum
  Clone ID: LIB104-004-Q1-E1-F9
ccgggtcaacggggaaggcgaagatgtcttggaaaacttacttgaacaaccacctgatttccaacatcaagggcaacaacctcgcctccgccgcaatcctcggcaacaacggcaccttctgggcccaaagcgccgatttcccgtcgttcaagccggcggaaatggccaacatcatgaaggacttcgacgagccggggaccctcgccccgaccgggctgctactcgcagacgccaagtacatggtcatccaaagtgaacctggcgccgtcatccgcggcaagaacggcgcgggaggcatcaccctgaagaagaccgggcaggcgctggtggtccgcatctacgacgagcccatgaccccggggcagtgcaacctggtggtggagaggctgggcgactacctggtagagcagggcatg

SEQ ID NO: 6600 - DNA, 362 bp, Triticum aestivum
  unsure at all n locations
  Clone ID: LIB104-004-Q1-E1-G10
aaggaggttttggggttggaaatggaatggcttaccattaccgccctataaaaaaaggccctactgctaaatgacctaccattaccgcctttcacaaagaacccactactgctaggtgtcagcatgtaaaattagacatcanaaatacattcatcatcaatgatccttttgtgtagaatctgaattgtcaatatgaatcctcactggtttaagaaccggtgaggattcctattgcgggcacagatcctacacatagagttcaatgaacactactangaaaaggcctgctagtggcgcacctgttttggctactaatggcgcactacangtgcgccactagcatcacgccattagaattttta

SEQ ID NO: 6601 - DNA, 198 bp, Triticum aestivum
  unsure at all n locations
  Clone ID: LIB104-004-Q1-E1-G11
caaagatatcatctgttcctgtctatccagagaccaattcnggctcattatgcatctttgcaatgcaaaacttatctgggaccgaatctccgacgtctatgaaggttatccaaacagtcatgatccttggtttgaagacttcaangaatctctcaaaacgatgactttcgaaccagaatcatcatcttctgcatcatg

SEQ ID NO: 6602 - DNA, 452 bp, Triticum aestivum
  Clone ID: LIB104-004-Q1-E1-G2
cgggtcaacgggcgtgcttttgtgttgattattttggctgatgatcaataaacaaattttccaggacttcctattttggtaggatttttagagttacataagtttgcgttagttagagattgctacagactattttgtttttgacatattctgtttttcgtgtgttgtttgcttattttgatgcatctatggctagtaaaatagtttataaaccatagagaagttggaataaagtacctttaacacaaatataaataaagaatgagttcattacagtaccttatgtggtggttttgttttctttcactaacggagcttataagatttcctgttgagttttgtgctgtgaagttttcatattttgggtaaagctttgatggactatggaataaggagtgccaagagcctaagcttggggttgctcaatgcacccaagatattcatcaatagca

SEQ ID NO: 6603 - DNA, 347 bp, Triticum aestivum
  unsure at all n locations
  Clone ID: LIB104-004-Q1-E1-G3
ctatgggaggaatagaataccatgatggaggttgtgtggagaagacaaaaaaggagaaagtctcacattgacgaggataatcaatgagctatggagatgtccatcaattgatgtcaacatgaggagtanggattgccatgcaacggatgcactagagctataaatatatgaatgctcaacaaaagaaactagtgggtgtgcatccaacttgcttgctcacgaagacctagggaattttgangaagcccattgtacgaatatacaagccaagttctataatgaaaaattcccactagtatatgaaagtgacaacataaaagactttctatatgaagaacatggtgcta

SEQ ID NO: 6604 - DNA, 286 bp, Triticum aestivum
  Clone ID: LIB104-004-Q1-E1-G4
cgggagcgccgagccggcgccggcgcccggcccgtcttgaactcgcggcgagaaataatactaatacccattcgcacgtgttgcagtaacgtagtttttttcgacgcagagtaacgtacttcttgatgttctttttttctgatcgacaagcttttctatggtagctatatgttcatcttgatctgtgcttcttttactttacatcatttattagctttgtgatctccttttgtcattgttgagatattgtttagtgctaaaaacaaaaggaaatttgaggaagacc

SEQ ID NO: 6605 - DNA, 309 bp, Triticum aestivum
  Clone ID: LIB104-004-Q1-E1-G8
caaggtgattggtttgcggtctttttcacatttactggtttttccagctctgctgccgcctgccacactttgtaatgcaattttttttgtcacatcggtcatataatcaggattctagccaaaaaaaaaaaaaaaaaaaaaaaaaaaaaaaaaaaaaaaaaaaaaaaaaaaaaaaaaacaaaaaaaaaaaaaaaaaaaaaaaaaaaaaaaagaaaaaaaaaaaaaataggcggtacaaaaagattaaaactaaactttcacgtgcatcaaaggtcaaagcccatacaaaatggtgccatactttcattt

SEQ ID NO: 6606 - DNA, 380 bp, Triticum aestivum
  Clone ID: LIB104-004-Q1-E1-H10
ggtatggacaaccttcaaggaggaaggcggccggccggacgccatcatgatcctgacggtgaaccgcgacaacatctgcagcttcatctcggagaccaaccccgggcacgtgcggtcgtgggagaccaaggacagccagctgacgatggtggcggacgacctgaagccgcgggcggtgctgacgtgcccggagaagaagatgatccagcaggtggtgttcgccagctacgggaacccgctggggatctgcggcaactacacgtttggcaactgccacacgcccaaggccaaggagattgtggataaggcgtgcgtggggaagaggagctgcgtgctggccgtgtcgcacgaggtgtacggcggggacctcaactgcccgg

SEQ ID NO: 6607 - DNA, 383 bp, Triticum aestivum
  Clone ID: LIB104-004-Q1-E1-H12
gcaacgcaagaaggggaaatcccaaatggaatttggcaaccggtaataaccggggcgggccaagtggacaataaccgggaaatggggacaagttttcaaaatccaggacaattttttaacccctggacggaattggaatccgggaaaattttcaaattcggaaacaaatttaaggcaattcaaacattttccaaaaacaaggacaattactgaatttaagaacaatttaaaccgattggtaacactttttaaacaatgtcacaagaataacatatttattaaatgaaaaaaaatagaatagatgaacatttttttagaagtttctggaacaaaattttaaattctcaaacatttttttatttaatacaaattttttgaaatgc

SEQ ID NO: 6608 - DNA, 386 bp, Triticum aestivum
  Clone ID: LIB104-004-Q1-E1-H4
cgtaaacctttttaacggcccctaatggatacacatccccaagtttttgcaaccaccgaggaggaggctggcattttggcatgggccacgtcagaattttgcacgtacctggacaccaggggcttattaccaagggcgttatccggcccgtcttcataaagaccgaataccttagggagtgttcggcgtctcgagttagggcttatatgcatcagctctgaatcatgtcttcggtcaaatgttgggtttgcccgactcctgtgttttgctgccttacgttccgctctatcggctaagacgacaccagaagaactactgcgattgtgccccggttcgtccaggcgagcaccttagtagagaaagccgaaaactgactatcatgatat

SEQ ID NO: 6609 - DNA, 264 bp, Triticum aestivum
  Clone ID: LIB104-005-Q1-E1-A11
acacactccttgtgtctttgtcacacatgcactctgtcctcctccactcaccctctctctctcacacacatgggctttttgcaacatctagcaagatgcccatgcgttgcacggcacatcaagatgcatttgtctgaataatttatcttgtaggggaaatagtctacttgtggcatgtccatctttcaaaagttggcttagggtgtgaggtagcttcttagccatttgccttcccagcagttgtaccgcatgaatgtcgattgg

SEQ ID NO: 6610 - DNA, 330 bp, Triticum aestivum
  Clone ID: LIB104-005-Q1-E1-A2
ggtcaaaaattaccgggtcgacgggagcacaataaaaaccaaaaccaaggcttaaccgcagttccgcagttcgtgtgttgcttatattatatgttgctattatattaccattattaagtgagggaggaattgattagtgccagtgtttgattttgttctgtttgtcatggtacgaggaaagatcaccaagtagataaggtctctagtagcagtttggctgtacctaatcagtacccttatttcattccgactagtaagtaaaaacttgtttttccaaaaaaaaaaaaaaaaaaaaaaagaaaaaaaaaaaagaaaaaaaaaaaaaaagaa

SEQ ID NO: 6611 - DNA, 358 bp, Triticum aestivum
  Clone ID: LIB104-005-Q1-E1-A3
ctgttcgacgcgaccaagtgatctggccgccgagcagcgacgccatgcgacgcgatgatccgggagcagagcggcttcggttaagaaataaataaagaggatcggtgctccaccgtgctgcggccgtgtggtgttgggtgtgattgtttgcttgttgcagtggctgcattcactggctgggcaccaggatccgtaagataagataaatgtgtacgtacgtgctgtattcctgaacttgtactgtgacgagcgagactcgctttgtaacgtgctattctgtttctacgtggccttcttctaaaaaaaaaaaaaaaaaaaaaaaaaaaaaaaaaaaaaaaaaaaaaaaaaatcggccgct

SEQ ID NO: 6612 - DNA, 388 bp, Triticum aestivum
  Clone ID: LIB104-005-Q1-E1-A4
cgggtcgacggggaaacgcaccggacttgcgagatatattggaggataaggcaagacaatcaagatcgatctatggatcgcgtgggcgccccatgatacgcgacgacaaccgtcgcgccggacacagtaagtctggccgggccgaacaaaatagacacatctcttttgagctctgtcatgatatcgcccagtacagaggcgccgcacacccactatgcttcacagatgaagtaatggatcatcaaatccccaaagggtttaaacccgtgaatattgaatcttacgatggcacaacagaccccgcggtttggatcgaagactatctcctccacatccaaatggcccgcggtgacaatcttcacgccatcgaatatctcccactcaaact

SEQ ID NO: 6613 - DNA, 263 bp, Triticum aestivum
  Clone ID: LIB104-005-Q1-E1-A5
ccgggcgatgtgtcttaggaagaagtggggtggtggtgtcatgggctccaagtcgcaagcgaagaccaaggccagggaaaggcttatcgcaaaggaggctgcgcagcggatgaactaagtttagcattgttgaaccatatctattcctcatccttgagtagtgtgcaagcatactgtggcagtttggctccagttttgaaagtcatttttgtttgtctgaaacatcttggaaagaacagtgtaagaatgaagtatttctgttt

SEQ ID NO: 6614 - DNA, 430 bp, Triticum aestivum
  Clone ID: LIB104-005-Q1-E1-B1
gggtcgagctccgcggacgaggtgcagcgcatgatggcggagatcgacaccgacggtgacggcttcatcgacttcagcgagttcatctccttctgcaacgccaaccccgggctcatgaaggacgtcgccaaggtcttctgaatcagttcatttcacctcagccgtccgatccaggagccgatccatctacgtacggcttcgtatatcaatttcatgcaactacctactccggtcccgatccagcctcagcttcacctgaggccggccctaattttgtttgatcattttttttgctaccagtagtaactagtgatgatcactgttccatcatttatttattttatatcatcacatgtttcttttctttctctacctttttgtcgatcgtcggctccagctcgatccaacgattcatgctgctaattggttg

SEQ ID NO: 6615 - DNA, 406 bp, Triticum aestivum
  Clone ID: LIB104-005-Q1-E1-B10
gggtcgacggccaacacgtagtagaaggcacctccggtgtagtagaagtcatcgtcgaaggtggtgtctggctcctgggctccaacatctggttgcgacaaccaggtagaagggatagggggaaaagagggagaaagcaaccgtgagtactcatccaaagtactcgcaagcaaggagctacactacatatgcatgcattggtatcaactggaataaagctatcatatgtggactgaactgcagaatgccggaataagagagggatagctagtcctttcgaagactacgcttctggcagcctccgtcttgcagcatgtagaagagagtagactgaagtcctccaagtatcatcacgtagcataatcctatccgatgatcctcccctcgtcgccctgtgagagagcga

SEQ ID NO: 6616 - DNA, 424 bp, Triticum aestivum
  Clone ID: LIB104-005-Q1-E1-B7
cccgggccgacgggggcctgcatgacctaagggctagggcgagggacgtgacggcgtcacaactcaaggcggcgactgccatcggtcaagtgtggctcatcgaggctgctcgctgtgtttcgtcgcagctgcaggccgcgagatcaggtcgggaaggcgccgcgcattgacgagtgagccaattttcggattggaccataacaacgtgtttcggtctccgacgtctagaagtagtggtaaagttttgaatttgtatggcaagaaccacttacgtaggtagctgacacgcacgacagtgtgtttacactcttacttatgtaaaagatatgaattatacatgagttgcctccacaatgaggaattgcgatagtagatatggcaattatgtgatagaaaaaaaaccaaaccggggaaccggcgccac

SEQ ID NO: 6617 - DNA, 412 bp, Triticum aestivum
  Clone ID: LIB104-005-Q1-E1-B9
gggtcgacgtccgcccgcaagaaaacaacgagcgcgctttcctatttagggtcgagagtggcactaatggtgaaggtaccaccagtgccatcctccttggcggacaccttcttggtttctggcggagctgccattgtcttcttacacttgccggtggagctcgatggtgcgtccttgatggtagcgcagcactccgaagaggtgcgcttgccggagtgggcatcagaactctttccggacttggtattcttcttcgccccgggagcttcaacggcaagtgacttgcgatctgttgcagctgctgcttctcggtagatcttgtcggcgcagataagagcatccttcttgtcgccagggacagaggtgacacttatcgggcctggcatcttcagtatgttgtatgcatagtgag

SEQ ID NO: 6618 - DNA, 398 bp, Triticum aestivum
  Clone ID: LIB104-005-Q1-E1-C11
ggtcgacggcgactcgcaggtgataaatccccatcactcgccggcgattggtctggacgcgaccaatggcagaaaccgcagcgatagcaccaccaccacaaccaatggcaccaccgcaaccagtggaggaaaacgcaacggcggcaccgtcacaaccaatggcaccaccgcaaccaatggcggaaaacgcaacggcagcaccaccgcaaccaatggcggaaagcgcaactgtcgttgtggtggtgccaccaccaccgccagacggcaccacgacattcctctgcctcatcctcgccttcttcatccctcccctcggcgttttcctcaagtacaaatgtgagattgaattctggatctgcctcatcctaacattcttggcctacgcgccgggcatcatc

SEQ ID NO: 6619 - DNA, 176 bp, Triticum aestivum
  Clone ID: LIB104-005-Q1-E1-C5
ggaagaataggaggaggaagaagacgatgaagaagaagacgaagaagaagaagaacgaagaagaagaagaggaagaggaagaatcagcagcagtatacgaacacgaagacgaccaagaggaagcagaggaacacgacgaagaagaccacgaagaacaagacgaagccctccacgaa

SEQ ID NO: 6620 - DNA, 390 bp, Triticum aestivum
  Clone ID: LIB104-005-Q1-E1-C9
gggtcgagcgccataatttatgaaacttgctccataaatgacctcatagccccatatttccacgtgggatagaggtcccacttgccaaatgtgggaagtctcagcttcttcacggccgtcacgccatgactggattttaaagccgcgtggcgcaggtacatgcacaatcgtgcgccggtaaacaccgatgaaccatggtcacggcaaggctaaccacgcatccattaatagcatccatcgctccctcccaattaccaatgcagtcatttgaatggcctcacgacttcatcccttcctagaaaagccctatggcgaggtgtccccatcaccgaagtcagtgctggagcccgacgacccgattgatgccgtgtcacggatatccgctatcga

SEQ ID NO: 6621 - DNA, 432 bp, Triticum aestivum
  Clone ID: LIB104-005-Q1-E1-D1
ggtccagatatccgggtcgacacggattgcgattttctcgagcaggaaaacattatggattacagtcttttggtgggcgtacattttagagacaaaagagttataatgactgaaggttcctttgacagtgatagcagcagaggatcatcaccccacctatcacctcacctatctagaggagatactgatccaaacaggttgtccaagataaagctcgggtcgaacatgccaacaaaagctggattgacaattcgaaagagtgattgtgaaccacagcttattggagaacctaccggggagttgtacgatgttatattgtactttgggattatagacatacttcaggactatgatatcagcaaaaagcttgagcatgcatacaagtctttccaatatgacccaacgtctatttcagcagtagattcaaaactg

SEQ ID NO: 6622 - DNA, 311 bp, Triticum aestivum
  Clone ID: LIB104-005-Q1-E1-D3
gggtcgacgcgggatgactaggtgacttatgtccatccgtgacatgaatatctgattttgcggtgagtcagtcactttgctcaatttagttttgcttgatgtttgaataaagtaccttgatccgaaattattaagtgttagagagtcttcacatggtcgtcacaaatgttcgactactcattgatcgtcacttagactctcatcggactactttattgtcgctcaaatgcaacacatagatcgtcgtatatcatggtcgtaactggaatatgccgagatttatcaactgtaatgtctcagctacatatccc

SEQ ID NO: 6623 - DNA, 427 bp, Triticum aestivum
  unsure at all n locations
  Clone ID: LIB104-005-Q1-E1-D4
cgggtcgacggggtgcgcgatctgggcgcggctgctgcggacggttggggtcaaggtcggcgggaacccgaacgtgtacgcgagcctccttggggttctgtggtcttccgtggcaaacaggtggcacctggagatgccagacattatagatggctcgatttcgatcatgtcaaggaccggccttgggatcggaatgtttaacacgggcctgttcataggtctacaggacaagctcgtcgtgtgccggcctggacttacggcgttgggcgtggcgatgaggttcgtcgctgctccggcagccaccgcggtcggagcgctacttttgggactgcgtggtgaccttntgcgtgttgccatcttacaggctgcactgcctcagtctgtcggagcatttatcttcgcgctagagtatgacctgcacgctgat

SEQ ID NO: 6624 - DNA, 401 bp, Triticum aestivum
  Clone ID: LIB104-005-Q1-E1-D9
ggtcgacggcttccctcactattacatgggtggaagaactaaaatagaggattctgaaaaaaaaaggaccttcgaaatccaattttatgtgtagcgcaaaggagttgcgattccttcttattcctatagaacatctagtaacaagaatatgaaatcgtaaatagcgaaaaattcttgtcttgcgcggtctaagtctaaggaaataaaaaaattcgcttatacaatttcatctacatcgaatttatatatcagaatagcggatagaggcatcattaaaggagtcaggtctacttactttatgcttctttccaattttatggtggatttgataagaacccttatcgctttcttgataaataatcgacaaaaaaagcgttttttttatataacctgcttgtttt

SEQ ID NO: 6625 - DNA, 349 bp, Triticum aestivum
  Clone ID: LIB104-005-Q1-E1-E12
gggtcgacggccagctgaaaatagataccagaaaaggtcagtggtgttttggagggcgcctcgtctgtatgtattccatctgtgtaagttaattcatttgggtgattggttcggctgtaggcggtatatctcaacacagtgggggatttgtaatgtttctggttttgtgttccttgtgagatgaaataataacttaacttgtttataacatgctcctcaattttcttcctaacaaaaaataaataattacaaaaaaaaaaaaaaaaaaaaaaacaaaaatataagaaaaaactaaaaataaaaaaaaaaaattaaaaaaaaaagaaaccctaaagtttcaacgaattaa

SEQ ID NO: 6626 - DNA, 431 bp, Triticum aestivum
  unsure at all n locations
  Clone ID: LIB104-005-Q1-E1-E2
cgggtcgacgggcccctcaaaagtctcttcattatttctgaaacaatctaaatttttaaaaacttcaaacaaagtgaaccaacttcaataagattgatagcaactactcatacaagtgcctagagcatatatcaagcattagaactacttggaaccatatatatttgacatgcaagctcaagaacatggtcactgtcggtgtcaaaaccggcggatctcgggtagggggtcncgaactgtgcgtctaggctggatgataacaggaggcagggaacacgatgttttacccaggttcgggccctcttgatggaggtaaaaccctacatcctgcttgattaatattgatgatatgggtagtacaagagtagatcttacacgagatcaaggaggctaaaccctanaagctagcctatggtatgattgttgatgtg

SEQ ID NO: 6627 - DNA, 359 bp, Triticum aestivum
  Clone ID: LIB104-005-Q1-E1-E3
cacctcgcacggagaataaaagattagtgaagaaagcaggggcttttctgaaatttttgtaaatctcgtttttatctagtcctttcctgtcaaaccctcgccgtcgctaggcagccagcatcagcaatagtactactactactactagtgccatttccgcccctgctctttcagctatttcctttttcctcccataaacccttgccttttagctaaaaacttaaatgtttaagttaaaaaaaaaaaaaaaaaaaaaaaaaaaaaaaaaacaaaaagaaaaaaacaaaaataaaaaataaaagaaacaggataaaccggaagctctagaggtttaaagctaatctgcatgtgaatgaaac

SEQ ID NO: 6628 - DNA, 377 bp, Triticum aestivum
  Clone ID: LIB104-005-Q1-E1-E9
ggtgaaattttagtgccataaaaatgtctctcttctttgaaacaatatactctggcatggattatatcaaggatcactatgtcaattcgtgctgtcattcattccacatcgataattaagacgatcatactgacatgatgcacgaattctttatagatgtttctcatattctgtacaaaatgtattcacatttaatgggtcgatcaagggttgtcatgtaatgaatcgtccaaggaaacagtgcatttgatgcttatagacgacaattttgctccattaatcctatttgaggatatcttttgctggtatttcgagatgtgaaaaattgtgtatgatcgactctacaatggtatccagccgtatgatgactatttcat

SEQ ID NO: 6629 - DNA, 363 bp, Triticum aestivum
  Clone ID: LIB104-005-Q1-E1-F12
gggtcgacggcgatgggaagaaggacggcgacgggaagaaggacggcgagaagaaggagggcggcgacgccaagaaggaaggcggcgacggcggcgacggcaagaaggacggcgatgggaagaaggacggcgacgggaagaaggacggcgagaagaaggaggagggcgacggcaagaaggacggcggcgggaagaaggacggcgacaagaaagaggagggcgacggcaagaaggacgaccagaagaagcccgccgccgtggccccgctgccgttcccgcaccacatgccgctgccgcaccacatgccgccgccctacatgttcaacgccgactacatgatgaaccagtaccggccggcgccgc

SEQ ID NO: 6630 - DNA, 421 bp, Triticum aestivum
  Clone ID: LIB104-005-Q1-E1-F4
cggtcgacgggtgattgtattgtatatgagtacaaaatctacacttattgcttcctttcaagttgcgtcgagcgagattgtctttagttagcataactcctcttcaaagataccacatgaaaatcttaactttagtggcatcttcgatttccagatttgtttataattgtccatttgaaaatgttgaataagtattatatatgttgaagaagtatttgaaaatgttgaataaatattaaaaatgttgaacaagtatttgaaaaatgttgaataagcattaaaatgttgaacaagtatgtaaaaattgttgaatatgtgttcggacaatgtcgaacgtgtatacaaaaaatgtttgatcacttattaaaaaatgttttttgacatataagaaaaatgcagcgaaaacgaaaacaagcataag

SEQ ID NO: 6631 - DNA, 67 bp, Triticum aestivum
  Clone ID: LIB104-005-Q1-E1-F6
aggtagagtgagctatgcgcaggcgaaggggttttggtgaattttcgataattttgcccgtgagata

SEQ ID NO: 6632 - DNA, 366 bp, Triticum aestivum
  Clone ID: LIB104-005-Q1-E1-G1
tatcatatatcttttgagaatgggacccagggtgtattagatggatttatgattcagtttaacacgaacacatttggtcttgcagccggtggaccacttcaggttcctccactccaacctgggtcctcagccaggacgctcctagctatggttttctcccagaatgtctcccctggagcaccaaacttgctactgcaggttgcagtgaagaataatcagcaacctgtgtggtatttcagtgacaaaggttcgctccatgtcttctttggtgaacatggcaaaatggatcgaacgggttttctcgaggcctggaaatctttacctgatgacaatgaattttcaaaagaatacgccacgttctgtcat

SEQ ID NO: 6633 - DNA, 395 bp, Triticum aestivum
  Clone ID: LIB104-005-Q1-E1-G10
gggtcgacggcaacttgtagatcaatgaatatgatatgtttgattccttgcaatagttttgcgatataaaggtggtgatattagagtcgtgctagttgagtaattgtgaaattgagaagtacttgtgttgaggtttgcaagtctcgtagcatgcacgtatggtaaacgttgtgtgacaaatttgaagcatggggtgttctttgattgctttccttatgagtggcggtcggcgacgagcgatggtcttttcctaccaatctatccccctaggggcatgcgtagtagtactttgcttcgagggctaataaacttttgcaataagtatatgagttctttatgactaatgtgagtccatggattatacgcactctcacccttccatcattgctagcctc

SEQ ID NO: 6634 - DNA, 315 bp, Triticum aestivum
  Clone ID: LIB104-005-Q1-E1-G11
gtcgtgttaccagtcgtgcacggtgcgcgtggtgggcacgctcaagcgtgcctggaagcgctccgccatcatctaaatcgtcgtcctcgtcttcagcgtcatcgtggacgccgtcggctgctgtgccttcaggaacaagcgccgctagctatacaacggtggcggatagtgggatcaaggcgcgtacgcgtgatcgcgcgcttgtctcggttatttaatgcttggtttggatggatgcgatggtctcttcgtgtcattcatcttcgttggcgttgtttctcttacgatggtctggtctagctttgtgcatgcgag

SEQ ID NO: 6635 - DNA, 411 bp, Triticum aestivum
  Clone ID: LIB104-005-Q1-E1-G12
ggtcgacgggctatgatagatacactgccgcatacaacttttgtgaaattatcagttacactatgggcaatatggtggtttagaagaaaagctattcacgaggagatcttccagagccctgcttccacgcatcagcttatctgtagcttcataagggagctagaatacatgccgggcaaccagcatggttttatgaagatccatgtagacgctagcattgcaaggaatcagaacaagggcgctgctgcagccgtctgcagagatggcgatggaaatttcatgggaaattcttcattagtgatttatggaattaatgatgctgcaacaacggaagctatcgcatgtcgtgaggccctttcattggtggatgatttgatgttacaaagcttcgtaatagcatcggactcgaag

SEQ ID NO: 6636 - DNA, 409 bp, Triticum aestivum
  unsure at all n locations
  Clone ID: LIB104-005-Q1-E1-G2
gggtcgacgggactgtatatgatgcagccggagggttttgtcgatcctaagaatgctgacaaagtatgcaagctccagcgatccatttatgggctggtgcaagcatctcggagttggaacattcgctttgatgagatgatcaaagcatttgggtttatgcagacttatggagaagcccgcgtttacaagaaagtgagtgggagctctgtagcatttctcatattctatgtagatgacatactcttgatgggaaatgatatagaacttttggacaacattaaggcctacttgaacaaatgtttttcaatgaaggaccttggagaagctgcttacatattaggcatcaagatctatanggatagatcgagatgcctcatangtctttcacaaagcacataccttgataaga

SEQ ID NO: 6637 - DNA, 393 bp, Triticum aestivum
  Clone ID: LIB104-005-Q1-E1-G3
gggtcgacgcggaggttgagaagatgattggcaggatagtgaagtggctgaagcccggtgggcatattttcatcagggaatcgtgcttccaccagtctggggattccaagaggaaagtgaacccgacgcactaccgggagccgaggttctacaccaaggtgtttaaggaatgccactcctatgaccaagaggggaattcctttgagctttctctggtaacttccaagtgcattggagcttatgtgaaaagcaagaagaaccagaaccagatatgttggctgtgggagaaggtcaagtgcacagaagacaaaggctttcagagattcctggacaatgtgcagtacaaatccactggaatcttgcgttatgagcgcgtgtttggggagggttatg

SEQ ID NO: 6638 - DNA, 425 bp, Triticum aestivum
  unsure at all n locations
  Clone ID: LIB104-005-Q1-E1-G4
gggtcgaggcgacagccaaagccatggacctcatcagcaagggcaccaactagctcgtctcggtgtcgcgacgtccgggtggaatcttaggagagtttagctccatttttattagggatgagttaagtttagttcgtgtgccagtcttaataaaaatcaagcatctgtataattaaggaggctactgattgttgtagccttcacctgcaatttatccgagccttgaatgaatggacttgtgttcggaaaaagaaaaatacagtgctgctggcttagagtagagtttgttttctagtcgtataatgcaatgtttacttatctcttgctcttagtttcatcatcagtaatgattttattcctcttggcggtcgcatcaggcatgtnttaataagatcgtattttatgggaaggagggagtacttttt

SEQ ID NO: 6639 - DNA, 233 bp, Triticum aestivum
  Clone ID: LIB104-005-Q1-E1-G6
cgggccgacgggatagcctagtatcctaggatctatcgtttgataatgggatccaaggtgtactatatggatttatgtggcattttagcaagaccacacttggtcatgtattccgtagtccagtttaggttcatcgactcaaatgtgggttctcaaggaagattctcttaacggtggttatctatcatggtgtcacgcatgtcgaagtaaacttgctcattgatgttgcacat

SEQ ID NO: 6640 - DNA, 416 bp, Triticum aestivum
  Clone ID: LIB104-005-Q1-E1-G8
gacgggccagtcgagcgccacgccacgaaattgtcgatgggatccaccttcctctctccacctcccactgacagtgccgccaatccatgagatccagtcctggcgccctcctctattcatcgccttgccttgggacccgtcaagatccatggcataggatcctgaccaccagcgccacgagtcatggggagatcctccctcggcttctgcggcaccggcgagatcctccccagcttatacggcagtggccttctcctcccatggtggcctgaggaggaggctccacctaccctggttccgctccaccaccacgacttgcatagctagatcaccgcacgggctgccatcaggcgaccacctctctgctccagcgcatgggctcaccgttccccatgtgtgtgctccctgttgaccat

SEQ ID NO: 6641 - DNA, 409 bp, Triticum aestivum
  Clone ID: LIB104-005-Q1-E1-G9
cgggtcgagccgaaggagcaactcctccacgaggtcatgcgtcgttcgcttacctcggcggagacggacgctaggcgactccagcacaagaatgtgatggcgctttggctcgggatcgaggtgtcgaagcgccttgcgagggagaatgagattgctaagaccagggcagagcaccacacgaaggagtgggaccgcgccatccagcgcctctccggctacatctcctcgacgtcggacatcagcagcaccggcacgaaaaatgacgatgaggatcctccctccgcggacgcctacacacagcagatgtaccaccgctccggatactgcaaaggcaagggcccagacaagaaatggtgatctctgccccctctagctaatatagtttgtatccagtaatctatcctgcaaa

SEQ ID NO: 6642 - DNA, 372 bp, Triticum aestivum
  Clone ID: LIB104-005-Q1-E1-H1
tcgacggggcatatgtattctatggtgggtgaacaaattactgttgagcaattgacaaaattgagcatagttatgagaatatctaggtatgatcatgtatataggcatcacgtccgagacaagtagaccgactcctgcctgcatctactactattactccactcatcgaccgctatccagcatgcatctagagtattaagttaaaaacagagtaacgccttaagcaagatgacatgatgtagagggatagacgcatgcaatatgaagaaaaccccatcttgttatcctcgatagcaacaatacaatacgtgccttgctgcccttactatcaccgggaaaggacaccgcaagattgaacccaaagctaagcac

SEQ ID NO: 6643 - DNA, 380 bp, Triticum aestivum
  Clone ID: LIB104-005-Q1-E1-H10
gccataatgcatggcaaattaagacaatctaaaggaggaagaatggagatccattttgaggcacgtttaaaaaggtcacatgatgctacatagtcagccaagttagtatcagaagcagccagtgttgttacgtgtcaagcacgtatcctcccatcatggttctactacagggatgagaaacatactagccagtttaacaccttccttgacgatttaaccgtaactacagttattccacacactttgtaatcttgtcttgcacagtaccataccttcaatacttgtcatgtgatcactcatattcatttttcatcaaatgatgttcaagttggatccactagatgctgcacctatcaatgcatgcactcatgtttttcagt

SEQ ID NO: 6644 - DNA, 425 bp, Triticum aestivum
  Clone ID: LIB104-005-Q1-E1-H11
gggtcgacggggttttttgacatacctctgcgccagcgtctctgtcctggccgccttcctctttggcctacccggcctcggtgcctcttgttggcgagttgctgcgggttcgacacggcgtcccgaatgtcttccctataaaacaccatatgtatatggtaggtgaagtgtctaaagggggatcctagtttttggagttgggattttggtttttcttacgtgcgatgcagggagcagtccgggatagtcgcccgtaatggccaccatggcgtcatcatagctcaattgatagaactgtctgtctatcagctccacgaatatgtccggatcttcttcgagtacgggaccaacggcccggtcagggtcctctggttgtggagatgggctgttttcctcccttacagcttttcacagtttctccataa

SEQ ID NO: 6645 - DNA, 374 bp, Triticum aestivum
  Clone ID: LIB104-005-Q1-E1-H12
taatgtcgctagactctgagaattgtccgttaaggtaacatcaggtatcggatttatggacattgaataggtcaagcggtagcttttcgtcgtgaaatactccacacagaagtcatacgcatacctcccagtgcgctcaaatactgcaattgcatgcacgcatggcaacccataaacattccactttcggcaagtgcagtcatacgtctcaatgttgacaacattaactgagtcatcgcataccttgaataaattaccatccccatcactttctgtgggcataacatcgagtgagtgagctttgctaacttcttcctgcaatttctggttagctacaggcgttaatccgtcaggccattcattacaagactctc

SEQ ID NO: 6646 - DNA, 441 bp, Triticum aestivum
  Clone ID: LIB104-005-Q1-E1-H2
ggtcgaggcgagatccaaaaggacagggctgcggttgaattcgaaaagaaggcacatgctgataaccttttacaaagtaaagcaatggagaaaaatatgattgccgtggctagtgagattgagaggcttcggggtgagcttgtaaatgctgaaaagcgggccactgctgtcaccacggcagcagctgtaactaaccctgggtatgctcaaccgtacagcagttctgaggcaacatatgccacaatgtatggcaatcccgaggcagcatatgcagcatatggcagtgctgaggcaacatatgctggaacatatgccaattctgatgcttatagcaccactaatcaggctcagactcgcactgatggtaatccacattacatgacccagccggctcactatgcgcagtacgaaggccagcagcagcagcagcagcagcagcac

SEQ ID NO: 6647 - DNA, 413 bp, Triticum aestivum
  Clone ID: LIB104-005-Q1-E1-H3
taccagaaatggaggtggcagcctgatgcctgcgacctcccaaggttcgatgctaagttgcttcttgagaagctaaggaacaaaaggatgatgtttgtgggggattcactgaacaggaaccagtgggagtccatggtgtgcctggtccagtctgtggctccatgggataagaaaaagcttgtcaagaatggatctctaaatgtgttccgccttcatgagtacaatgcaacgattgagttctattgggctcctttcctagttgagtcgaactcagatgatccagacattcgtagcatcactgaccgaatgatcacgccaacatcgatcgccaagcatgcagcaaattggataggggtggactatttgatcttcaacacttacatttggtggatgaacaccccgaacatgaaaat

SEQ ID NO: 6648 - DNA, 388 bp, Triticum aestivum
  Clone ID: LIB104-005-Q1-E1-H4
actcaaaaaatcaacgtctacgagcatagcatagcagtataagcataacgtagaagtaactcccaaggtttgaatgcaggacagtaggttcctacctcatcaactacttcccaatacccacatgttatcaaatcctaaccatgcaatgtttgagggtgaaactaatgcataaaaactgggtatgaaagggatatgatcaacgtgtgaacttgccttgtactgttgatgaagatgattcgcactcataactcttgatagttctactcgtcacactccgttcaatctagtaagaaagcattagtaaccacacataagcaatcactcaaaagaccgggaagaatgaagaacacgattcgaaaaacatcaaaaccaagcaaataactcttgc

SEQ ID NO: 6649 - DNA, 443 bp, Triticum aestivum
  Clone ID: LIB104-005-Q1-E1-H6
ccgggtcgacgggaagcttaatgattgttttgagatatggaggtagtgatattaaagttgtgctagttgagtagttgtgaatttgagaaatacttgtgttgaagtttgtaagtcccgtagcatgcatgtatggtaaacgttatgtaacaaatttgaaacatgaggtgttctttgattgtcctccttatgagtggcggtcggggacgagcaatggtattttcctaccaatctatccccctaggagcatgcgcgtagtgcttggtttttgatgacttgtagatttttgcaataagtatgcgagttctttatgactaatgttgagtccatggattatacgctctctcacctttccatcattgctagccctttctcacattgagagttggtgcaaacttcgccggtgcatccaaaccccgtgatatgatacgctctttcacacataa

SEQ ID NO: 6650 - DNA, 335 bp, Triticum aestivum
  Clone ID: LIB104-005-Q1-E1-H8
ttattgggctttatgggaaagagagcatagcatgccactcactcccaaggcctagtccgaagtggactagggggaacggatgcgcccctctttccttctcttcacgtttccctttccttctcacgtactcctacgaggtggaacggctcctagttctacgaggaaagggggaatccgattcccggttggacttgcactctcctgttgctcaccatagatcgggcccagccctcttgaccactacacccttatatacctggtcaatgggcatcccatacactcattaattgatctcctgatctcttaaccatgtgcggtgcccccctccaccatat

SEQ ID NO: 6651 - DNA, 413 bp, Triticum aestivum
  Clone ID: LIB104-006-Q1-E1-A11
gtcccgggccgacggggggattgattttcctgcaggaggcgcggtcgccgagtctgattcggacgaggaagatcagatccaggtcaatggaaaagcaccctcaatcgggtcaaggtgcagcgtgaagaagttgcacgacctgatttcctcatttgatgaggagaaacgacagtatgtagccgagatggagtttggggggctgctagagctaccaaagataacaaggacggataggcatttcttgatgtctatcctaagccacatcgatgaggaggcaagttcaattacaattgatcacaaacgcgacatgcaatttttcgatgaagatgtcaaactggtcatcggcataccatgtggaactgctcctgttcgccctccagaccacgctgttccggaggcagtggtgacacaga

SEQ ID NO: 6652 - DNA, 418 bp, Triticum aestivum
  unsure at all n locations
  Clone ID: LIB104-006-Q1-E1-A3
gggtcgaggcggtgaagaaatactacancaagtccatcggcaggccggccggcaacaacagcagcaacaacaacttcagcggctacggcggcaagaagggcgctgccgacggcaagaagaagcacgccaagaacgagcgatgggacaacaaccatggcgcggcctcggagaagcggttcaagacgctgccggcgtccgaggcgctgccccggaacgagcccatcggcggctacatcttcgtctgcaacaacgacaccatggaggagaacctcaagaggcagctcttcgggttgccatccagatacagagattcagtgagggcgatcatgccggggctgcccctcttcctctacaactactccacccatcagctccacggcatcttcgaggctgcgagctttggcggagcgaacaatca

SEQ ID NO: 6653 - DNA, 423 bp, Triticum aestivum
  Clone ID: LIB104-006-Q1-E1-A5
acgggtcacttcaaacaaacatgtatcttttttttttctttcgattctgcctctggcaccggaatagttctatgtcacaaaaatcaagcccaatcaagcgtggcacaggtcctagatacacgggacacacgcacctagtggagcggtcctatatggcgccttaggcggcaaatctcttccctggcgctctcgcgaagctcgcctgagcctagcccaacaaaggctagtcgatcggggcgcagttctcctacgttcgctgggacaatggttgatcggtcaaccgttggccatttggacttctgtaaaaaatgaatctgaaaaattgtacaaaaacatgaaatttgaaaagaacatggatttgaaaaaagtacatatatttgcaaaaaaaatgcaaatatgaactaataaattttgataaaattc

SEQ ID NO: 6654 - DNA, 389 bp, Triticum aestivum
  Clone ID: LIB104-006-Q1-E1-B1
caatggaagatgtaggcgtgatatgtcaagtagtggacagataagccaaccactggatgtggttttgagggatttttgcagtggggtttgtagggtgctatgccgcgctgggtttgggatttgaaataaaacgaagggagatgtgccacgctcttaaatgccagtcttctgctctaatcttgctaaaaaaaaaaaaaaaaaaaaaaaaaaaaaaaaaaaaaaaaaaaaaaaaaaaaaaaaaaaaaaaaaaaaaaaagaaaaaaaaaaaaaaaaaaaaaaaagaagaggaaaaaaattcaaagaataaattaaaaaaaataaaaaaaaaaaaaagaaatagagataaaaaaaaaaaggggggcccccaaaaggtttacagcctctttttc

SEQ ID NO: 6655 - DNA, 432 bp, Triticum aestivum
  Clone ID: LIB104-006-Q1-E1-B2
gggtcgaccggagaccctgatacaattgttgatgacattctggtagccaccgatggacgagaaccttgcctattggtccgcctcgttcgacgagcaggaaaatggttctcttcgtccctcgcccttggtaccgtcgttgttgccgacataatcgacaggctagcctctgacttgccttgcttgcatgatcacgcaagacgtctccacccttccaacttttaacccacatggtgggcccataacccacagttccacaggatcaaaacctgactctcctgtacacccccggtttccaaagttattccccacgcttgacttcgtatgtaattcacgggtcaccttcctaatgctctattctggtatcagacgctatacttactctcgttgctctgaacccctttctcactctggttcagacttcgagcaactatc

SEQ ID NO: 6656 - DNA, 413 bp, Triticum aestivum
  Clone ID: LIB104-006-Q1-E1-B3
gggtcgacgggtatcatgaacattatggtgctaatttgaggcacatgtgtggtaacaggatagtaagattgtcccttctctctttttctcgcttttttgggccttctcattttatggcctttctctctttgttttattcctcacttgggacaatgctctagaaaatgatgatcatcacacttctatttatttacaactcattgattacaactcgacactaaaacatagtatgactctataagaatgcctccggtggtgtaccgggatatgcaatgagtcatcaatgatatgtatgaagctttggcatcgccaagcttaggctcttgccaatccttgttccataatccatcagatctatcatgcaaaacgtgaaaacttcagaccagaccacttaacaaatcatctcgtgatct

SEQ ID NO: 6657 - DNA, 373 bp, Triticum aestivum
  Clone ID: LIB104-006-Q1-E1-B4
cgggatcatgatcatgaggaatatataggataataaggtggtgtattaccaccatgcccgttgagctgatgtttgtttcagctagagaaatcgttacgcccgctcataattcctttttcgacgctctggagaataataactactggtatatcattctatatcaaagccggcttgtgaaataaatgatccgccgtcttgccttcaaaaaaaaaaaaaaaaaaaaaaaaaaaaaaaacggacgcacaaaaggattaaaacataaagtagacgtaaataaaaaatcataacatctacaataaagtcaacaaaattaaatataaatgaccgtcgttttaaaaaagtcatgactgggaaaaaaaaaagagtggccccc

SEQ ID NO: 6658 - DNA, 433 bp, Triticum aestivum
  Clone ID: LIB104-006-Q1-E1-B5
attcccgggccgactctcccacccactcctcctcccccctctctagcaatcggcgagcgatggcgtgggcgacacggttcctgtcagcagtgtgcttcttcgcggcgggcgtcctcttcgccccagatgtcttcatcggcgaccgctccggctccggcgccaccgccgtcacggccgccaaggtgtcccacctcctctgcttcgccacctgctggggcgctgcgctctgggctaccttcatcggtggaatcatcatgttcaagaatctgccgaggcaccagttcgggaacctgcaggggaagatgttcccggcctacttcacgctcatctccgcctgcgccgccgtctccgtcgctgccttcgcctacctccacccgtggaaggccgcctccgccgtcgagcgctaccagcttggcttcctcatctccgcgct

SEQ ID NO: 6659 - DNA, 305 bp, Triticum aestivum
  Clone ID: LIB104-006-Q1-E1-B8
gacgggcgggatcatgatcatgaggaatatataggataataaggtggtgtattaccaccatgcccgttgagctgatgtttgtttcagctagagaaatcgttacgcccgctcataattcctttttcgacgctctggagaataataactactggtatatcattctatatcaaagccggcttgtgaaataaatgatccgccgtcttgccttcaaaaaaaaaaaaaaaaaaaaaaaaaaaaaaaaaaaaaaaaaaaaaaaaaaaaaaaaaaaataaaaaaaaaaaaaaaaaaaaacaaaaaagacagaa

SEQ ID NO: 6660 - DNA, 380 bp, Triticum aestivum
  Clone ID: LIB104-006-Q1-E1-C1
cgggtcgacgggcacgggaggaaggcgcacgacgacgacgacgacgacggtggtgcgtaccggaagccaaagccgtcccacggcgacgacgacgaccggcccagctacggccgcaagaagaatgacgacgacgacgacgatgagaggcggtcgcggtacaagaagcgcgacgacgacgacgatgatgagaggaagccacggcacaagaagtgcgacgatgacgacgacgacgaccatgagaggaggccgcgctacaagaaacgtgatgacgacgacgatgacgacgatgacagaaagccgcgttacaagaagcgcgatgacgacgacgacgatgatgataggaagccacgttacaagcacgatgatgatgaggacgacga

SEQ ID NO: 6661 - DNA, 352 bp, Triticum aestivum
  Clone ID: LIB104-006-Q1-E1-C11
ccgggtcgacgggccgcacgacaagcgcaagagcaaggcctccatggaacagggggtgatggacaacctcaacaaggctacgccgcctactgcaagcgtgaaagcaaagccccgcagaagcttctgaacccgatgggccacgcagtcacagagttagtgatctcctttgactgatttcgctaggatgatactacatgagttagaagtttgtcgtgccggggacggaggcgagacggaggcttggcttgtgaagtgacgcttggatgcacgcgtaattttctttacattttttgttctcgttttgactttgaggatcgcgccataattcttttgaactgtcaactgcattcag

SEQ ID NO: 6662 - DNA, 437 bp, Triticum aestivum
  Clone ID: LIB104-006-Q1-E1-C2
gggtcgaccggcaatgttgaataataattttagtgatttgttatagtagaaaatgataagtttttgcgttggtttatactaacctatctcacgagttcttgttgagtttgtagtgaatgaagcttttttgagaaatagagaaaccatgatatgagaggaattaaggagacacaaaagttcaagcttgtggatgcccaaggcaccccaagataatatttcaagaagtctcaagaatctaagcttggggatgccccagtaggcatcccacctttcttcttcaacaactatcggttagtatctgttgagcctaatttttccttattcacatgagttgtgctatccttgcaatgtcattttattttgttttgcttgatgtttgaatacaataccaagatctaaaattccttaaagttagagagtcttcacatagttgcaca

SEQ ID NO: 6663 - DNA, 418 bp, Triticum aestivum
  Clone ID: LIB104-006-Q1-E1-C4
ggttcacacacttttgtgttttgtctaattgcaggtgtatgggacatttgtacaatccacatatgaagataaggaagaaagagatgtttatttgctgtccaaaaagttctctcacgtcacttttggcccaagagaagatagagtccaagtctctcacgttctggattcagattcggactgcacagacatacctgactcaaaacgcacacaagtttttcatacggactccgaattgggtgattctttttttgttggaaactagatttcgtgcactttccaacccaattggaatcaccttcaaattcgtccggagcgttgagttgtggacgaaacaatctgatgctgcagcagaatccgagtcaaactacaagtccaaaggtgttacatcacctccacttgggcccattggccttgtacg

SEQ ID NO: 6664 - DNA, 426 bp, Triticum aestivum
  Clone ID: LIB104-006-Q1-E1-C6
gggtcgacgggtattattcacgtcatgggttttacaagtacaaaaacgacgtaacctagatgaggtcacaacctgaatatagtccgtgtggttatggagcactgctagaaaccaagaggtgctgggttcgataccatgttctgcaagttttttaccaacgagggaaaaacaagtcccgagcgggaatcacggataagttgcaaaaatcctgccggcaggatttgagcttttccgattaaaaaaatatgcatctagtgtaaaaaaaaacattgtgctacttttgaaaaatgtcaatagcatttggaaaatatttgtgaaattcaagaaaaatcacgtgtttcagaacaatgttcatttccataaaatgtttatgcaatgaaaataaatgtttgcataatttaaaaaaatccatcgaataaaaataaa

SEQ ID NO: 6665 - DNA, 403 bp, Triticum aestivum
  Clone ID: LIB104-006-Q1-E1-D12
attcccgggccgacgggtccggagaaacaactctgcactgcgagcatctgctgagcctggagtcaggaccgaccatcgtgaaggcccggaccatgtggcggccaaagggggccaagtcccaggaaacggcggctctgtcgtggtgattttcggcggggacggttcggtcaagcccggagcaaccacccgtacgcgttctcttctggaaaaaatcacacattgcacatacatatggatgcctataatcccatcatggcattgcgaagggatgcccaagttatatacatatacatagaatggaagtgtgtgaaggtggagggggtcagaggggtataggagagcgatcagaagccgagaaggcaaattggtgttgtaattatctgagtttgtagctactgcggtg

SEQ ID NO: 6666 - DNA, 370 bp, Triticum aestivum
  Clone ID: LIB104-006-Q1-E1-D6
ttgacgggccaaagaagattgaggaggttcgaagggatgctgtgaaacagaaaatgagccaatcaactagggtaggttcttcccctaactataactcatctgctagctccattagctcatcagcaagaccagggcctccaccagattatggtgttcgaggatcttctgcttctcgtggatcctctcaggttcgtgtatatggatcccagaatgttaatctggatacaagataccagacttcaaacagagccatgtcagtcccacttcatcaaaggcgatctgataaatccattcgacttagtcctcaaggtgacttgggaagagaaatgtcaatttgtgggaagccaccagcttcaaatgacattttgcc

SEQ ID NO: 6667 - DNA, 266 bp, Triticum aestivum
  Clone ID: LIB104-006-Q1-E1-E2
cgggtcgacgggggtagtaagaccaaaggacctaagcagctgtaggttgagaggaggttcaacatggattggaagtgaagaagtggtcattactaggtgatgacttctctttggaagccttttcaaaatgaaattctaaggcagcagcgtcgtttacctatctgacacttgctttttctatttatggacttctagctattggggatgattcttatggatgcctggtttggtttgatttatatgcataaatgaaatgattcttttgc

SEQ ID NO: 6668 - DNA, 437 bp, Triticum aestivum
  Clone ID: LIB104-006-Q1-E1-E4
cgggtcgaccgggatgaaggaggagaaaagaaaatgacccttcggtcctatttatgaagcaaaagacaagtgtcaggcgcgcgaatccaggagccacaaatttcggaagcggagttgtcgcctcgattattgcggatctgttaaacaaagaaggcatcataaatgttagcttcatgatgatgtcatgccggtttacagtaaccaggaaagatgatgacacgacggttcaacgactacaagaagattttgaagacaaagatttttgctaaggattgacatgaacccgttcaaatcaatctggggcctaatgtcggggatattactactgggcgtaaaccggcctacctgggccgggttaacttcatcagtagttcaatggtgttaaagcccaaagaggcagataagggcccaaggcctaaaatcggtttagaacctat

SEQ ID NO: 6669 - DNA, 411 bp, Triticum aestivum
  Clone ID: LIB104-006-Q1-E1-E5
aattccgggcgacgggaggctccaaccttcccttttcatgcaaatttaatgataatgaaaccttagcttcttatgctaatggtatctatgattactatgatgtggaacaaatagaaaaatttgttgcttttatgtgtgcttatgagattgaatctatgtttaaagcatttgacgattttgattattcggtttatagaccagaaaattttgctatgcttagatattgctatgaaaattatgaatacaattacaatattaatgcatttattgagaaagtctcccctgtccaagaagagactaatattttgcaggaagctatggaagaagaaattgatgaaactgtgagctcattggatgaaaaagatgatgaggagagcgaagaacaaaaggaggaagagcggattagctacc

SEQ ID NO: 6670 - DNA, 427 bp, Triticum aestivum
  Clone ID: LIB104-006-Q1-E1-E8
gggccgacgggctatcttagaagaggtttcaatcgattatgatgagaacaaagttgctacttatgataattattgtgatgatatgtatgctatacaaagtagtgatgattatattaaaacttgtcatgattatgattaccctttttctgaatattactcttttaatgtggaaacaatttatagtattcgagtttcttatgatactcccactattccgaatgagaagaattttgcttatgtggagagtaataaaatttctatgcttgtagatcatgaaaataatgctttatgtaatggtcatattgttgaattcattcatgatgctactgaaaattattatgagggagtaatatatgcttgtaggaattgcaataatatcaagtttcctctctgtgtgcttaaagttttaaagttatgtttgttttgc

SEQ ID NO: 6671 - DNA, 426 bp, Triticum aestivum
  Clone ID: LIB104-006-Q1-E1-E9
taaggtctagaattcccgggccgacgggccgtttaagcatattcatattgtccctgggtgttcatatagggtgaatttttttggtttccaataagtttcccaacaagaataagcaatgaagtgtaagccaagtcctcaaaagattccaacctgaagaagccaagaaccaagtcctgtgtgggccaatccccaattaatggcgaatcctaaggtcaacccaagaatggcgggcgatgttgcgtgcaacccctaatccaagacaccaataataacccttaaactaatcctcaagtccaagacattgataacttccttaaggttgcctcaactcctgtggacatttttgcccctaattgcacatgccacttacacgtgggaccgacccagtataaagaaaaagaactctctgtcacacctcactctcac

SEQ ID NO: 6672 - DNA, 392 bp, Triticum aestivum
  Clone ID: LIB104-006-Q1-E1-F1
cgggtcgaccggcgggatcatgatcatgaggaatatataggataataaggtggtgtattaccaccatgcccgttgagctgatgtttgtttcagctagagaaatcgttacgcccgctcataattcctttttcgacgctctggagaataataactactggtatatcattctatatcaaagccggcttgtgaaataaatgatccgccgtcttgccttcaaaaaaaaaaaaaaaaaaaaaaaacaaaaaaaaaaacaaaaaaaaaaaaaaacaaaaaaaaaaaaaaaaaaaaaaaaaaaaaaaaaaaaaaaaataaaaaaaaacaaaaaaaaaaaaaaaaaaaaataaaaaaaaatttaaacaaaaataacaaaacaaaaaaaaaaagggggcccc

SEQ ID NO: 6673 - DNA, 446 bp, Triticum aestivum
  Clone ID: LIB104-006-Q1-E1-F2
cgggtcgacggggaaaatgaaaaaaaaaaaaaaatataaaaaatgaaaaagaaaaaaaaaaaaaaaaaaaaaaataaatactaacaaaagaatcaacacaataaaaacaaaaaacaaacaaaacaaatcctttttcgaagacttaaaaaaaaaaaaattaaataagaaaccaatccataacatcaaaatcgtaaaaaaaaaacaaaatcaaaaaacataaccgccccccccaaaatttccacctttactttcccgtgcaacccaattaaaacccccccacaagtggccccccaattttatttcagggcctcttttttaaaaaattcgacccgtgaaaaacccctgtttttcccaattttaccccttttaaaaaaaacccctttttccaaatttggataaacctaaaaggcccccccttttttccccttccccaaatttttcccccc

SEQ ID NO: 6674 - DNA, 434 bp, Triticum aestivum
  Clone ID: LIB104-006-Q1-E1-F3
gggtcgaccggaagcggccgtcgatcttaggccactgacgatggaggacctgaggcaggccaaaaatcaggtcgccgcgagcttcgccgcggagggcgctgtcatgaacgagctgaagcagtggaacgacctctacggcgaaggagggtcgaggaagaaggagcagctgacctactttttgtagaaccggaaggatggtggatgtgtcgtgttgggcaaatcgctgaagccttggcagagcatgagcatacatatgttggtgggaaaaggagagaggatttcctgtgagcaaccgtgagttaggatcttggagtgaatggactccttgagatgtgtggcagggggcattggatcatgtacgattcttttatacgaacaagtattgtagttattcattattatatatgttgtacctggtttgttaacctgtgtgt

SEQ ID NO: 6675 - DNA, 453 bp, Triticum aestivum
  unsure at all n locations
  Clone ID: LIB104-006-Q1-E1-G1
ggtccagatatccgggtcgacggggatctaatataaataaatatgtaactgagaaggcctttgctgaattaatgttgccatgcatcgacaggagttcgcctgaatttcgcagtatatttgctggtgaattaatcaaacagatgggaactgtcagtgaacacatcaaagcaatatcacgaaatggtgccaaacatgttggtttagttccttcaggaaatgatgtttcatcgaacaaatccagtggtcgtaaaggaattcgaggtggaagtccaaatattggcaggcgagtcacggttggtaatgatccaactcctccttcagcatctgctctgcaggcaatagtgtggctgcgcctccaatttatcatcaggctgcttcaagtaatcctggcagatangggcatgaggcatacacttgctcctgcgatactaagcctgcttgcggcacgcataa

SEQ ID NO: 6676 - DNA, 431 bp, Triticum aestivum
  Clone ID: LIB104-006-Q1-E1-G10
tccgggtcgacggggacatcgacgatgagttgccgtcgttcagcacccacaagaccatcctcggtcactgggaggatccggtgctcgaagtctgacatctaagtgtatggttgtgtcttctcgcattcgcgttgatagtgtagttgtgatgttgcccagaagaaaatatgagacacaggaagagccgatgagatgagatagtgatcgtccctgttaatatcgtggacgttcgggaagaagttgtagattctagtaaccgatctggcctagttttggtcatcctagtgttggccttgggatttttgcagtgggaggtaccgactcactgtttcgccttggaccttcatttcttcacttttagttacattctttttagcttttacttggctttttcgtatgtacctttttattcaacacatgtccaagttttt

SEQ ID NO: 6677 - DNA, 401 bp, Triticum aestivum
  Clone ID: LIB104-006-Q1-E1-G12
tcccgggtcgacggggatgacgacccctctctattgccagagcaaccaggcaagccccccctttgatcaccagatatcgcctactcttctctatactgcttgcattagagtagtgtagcatgttactgctttccgtcaatcctattctgatgcatagcctgacattgttgctacacctgttgataccttacctgcaatcctaaatgcttagtataggatgctagtttatcatcattggccctacattcttgtcagtctgccttgctatactatcgggccgtgatcacttgggaggtgatcacgggtatatactatacatacatacatactatacagatggtgactaaagtcgggtcagctcattgagtacccgcaagtgattctgacgatggggctgaaag

SEQ ID NO: 6678 - DNA, 426 bp, Triticum aestivum
  Clone ID: LIB104-006-Q1-E1-G2
gggtcgacgggcatctagtaacaagaatatgaaatcgtaaatagcgaaaaattcttgtcttgcgcggtctaagtctaaggaaataaaaaaaattcgcttatacaatttcatctacatcgaatttatatatcagaatagcggatagaggcatcattaaaggagtcaggtctacttactttatgcttcttcccaattttatggtggatttgataagaaccctttttgctttcttgataaataatcgacaaaaaaagcgttttttttatataacctgcttgttttattataattataacaagtcctatatggaaatgcccgctaaagagaaaatctgtttgattgtctctcggccaatatcgatttttagaaagaaaaaacaagaattttcttctttttttattaacattaagaaaaaaagaatataac

SEQ ID NO: 6679 - DNA, 374 bp, Triticum aestivum
  Clone ID: LIB104-006-Q1-E1-H10
ggcagttccagcttaaaagactcattgcgtccggcggtcctccgccggggaggccgccgttctcgcgtccgagctctctcccgtactagggatcttcttccccactccaccgcttggtttttctgactgcgaagtttttggcctcttcgggtcttgttttggaggagggctgattggggtagcagatccgttcttgccggagagcaccacttccagccccgtatttcctttgtggttttgcaaaccctgcacctcatcagaaggacgtttgcgattggcatcagaatcctccgtctccatcttctcttgcttaggatcatcatcctccttcgtagcttgctggcccgacccttgttggtttgaagtcctgttcc

SEQ ID NO: 6680 - DNA, 396 bp, Triticum aestivum
  Clone ID: LIB104-006-Q1-E1-H12
cggggagcagaaggaagagatggactggaagggctcgtgtcgtcccgtacatatagccgagggaggccaaccgtcggcctccatgatcacaggtaatcatgacccgttttgcatgcagggacttgtcaattcgtgcagttgccgaggcatcgtggggagccaggatgcccacgtccaatcaaccgccacgcgtctcccaaggccgcaggctattgggcccgtggcgcttcgtacttgccccttcgcttccctgctaagccaagtctgggcgcgccttgggcccgggggctactgtcagcattctgggaacggggttacctagacttgcctgcctgcggcctgcagcgtggctcagggagcggcccagtacggcccatcttcatcagcgcatgccca

SEQ ID NO: 6681 - DNA, 417 bp, Triticum aestivum
  Clone ID: LIB104-006-Q1-E1-H2
cgggtcgacgggggaatggtcttttccatccccttacatattgaagttcatcacaaagctcttgtagctcgatggaagcgactgaaggattctgtcaatgaccgcgtcatccgggagattaactcccagctgagttaagcggttatgtaatccagacatagtgagtatgtgctcactgacagaactattttcctccatcttacagctgaagaacttgtcggaggcttcatatctctcgacccgggcatgagcttgaaaaaccattttcagctcttcgaacatctcatatgctccgtgtctctcaaaacgcttttggagccccggttctaagctgtaaagcatgccgcactgaacgaaggagtagtcatcagcatgtgtctgccaagcgttcaaaacatcctgttctgcaagggaaac

SEQ ID NO: 6682 - DNA, 403 bp, Triticum aestivum
  Clone ID: LIB104-006-Q1-E1-H3
tcgacgggaggtgctcgaggggcccacgatataagattcaactacatcataaggctcttgtaactcgatggatccgagtgaacgattctgtcaatgatcgcctcatcctcggagattaactcccatctgagttaagcggttatgtccaccagacatagtgagtatgtgctcactgacagaactattttcttccatcttacatctgaagaacttgtcagacgcatcatatctctcgacccaggcatgatcttgatataccattttcagctcatcgaacatctcatatgctccgtgtctctcaatacgcttttggtgccgcggatctaagctgtaaagcatgccgcactaaactaaggattactcatcagcaatatgtctcacaagcgttcataacatcatgttc

SEQ ID NO: 6683 - DNA, 384 bp, Triticum aestivum
  Clone ID: LIB104-006-Q1-E1-H4
cgggtcgacgcggaagactcgacaatggttgcccacgcggtggggagtacgagggtttactggtccggctgccgtcgctggaaaataataggaggtgtgggtgagtagaggaatggcctggccagcaatgaagtagggtagggcggtgcggcccgtgcggcagcacagccggccacgggaggcgggagcaggcagtcccaccagagctggtttgggcggctggagcaagaagatcagatattgaagaagcagcacggtcgttagattaacatccaacgatcactgctgctacaatcgtttgtggactaacttgataagaccaaagtacacgtcaacctagtatacccacaaatcagcctccaaatctgtcccaaacaacataca

SEQ ID NO: 6684 - DNA, 410 bp, Triticum aestivum
  Clone ID: LIB104-006-Q1-E1-H6
attcccgggccgacgggccggcacaacgacacggagctccacctcgccgcgcagcgcggggacctcgacgccgtgcgccagatcatcgtcgaaatcgacgcgcagatgaccgggactggcgaggagttcgacagcgaggtggcggagatccgcgccgccgtgctcaacgagcccaacgaggtcggggagaccgcgctgctcatcgcagctgagaaagggttcatcgacgtcgtcctcgagctgctcaatcactctgacaaggagagccttgcgaggaagaacaaatcaggattcgatgctctgcatgtcgctgcaaaggaaggccaccgagatattgtgaaggtactcctggaccatgatccatcccttgggaagacgtttggccaatcaaatgtgactcctctgataac

SEQ ID NO: 6685 - DNA, 390 bp, Triticum aestivum
  Clone ID: LIB104-007-Q1-E1-A10
ggtctaaataccgggtcgacctcatcaagaaggctacagtcttccactatggatcaataagcttgattgccgagccttgccggacagcgcatctgcacgccatgaacgttgccaaagacgccggcgcgcttctctcgtatgacccgaacctgagggaggcgttgtggccatcccttgacgaggctcgcaccaagatcttgagcatctgggaccatgcagacattgtcaaggtcagcgatgtcgagcttgagtttttgactggcatcaactcggtggaggacgatgttgccatgaagctgtggcgccctaccttcaagctcatgcttgtcactcttggagatcaaggatgcaagtactataccaaggatttccgtggaactgtcccatcct

SEQ ID NO: 6686 - DNA, 320 bp, Triticum aestivum
  Clone ID: LIB104-007-Q1-E1-A11
atgagcaaatgaaagactaaaggatttcgtgaggatgagcatgatactttatggtttgaggatcacgtatatgtgcctaatgaacccgagagcaggaagttgattctgcaagatgcccatgattcgccgcattcaattcatccaggaaacaccaagatgtatctggatctgaaggaaagattttggtggacaggaatgaagaaggatattgccgagtatgtagcagtttgtgatgtatgtcggagagttaaggcagagcatcagaagccaaatggattgctacagccattgccaatacccgaatggaagtgggataagct

SEQ ID NO: 6687 - DNA, 381 bp, Triticum aestivum
  Clone ID: LIB104-007-Q1-E1-A12
gagatcgtagagaaaaaggaacggatgagcataggaaagactaaaggatttcgtgaggatgagcatgatactttatggtttgaggatcacgtatatgtgcctaatgaacccgacatcaggaagttgattctgcaggaggcccatgattcgccgcattcaattcatccaggaaataccaagatgtatctggatctgaaggaaagattttggtggacaggaatgaataaggatattgccgagtatgtagcagtttgtgatgtatgtcggagagttaaggcagagcatcagaagccatatggattgctacagccattgccaatacccgaatggaagtgggataagccaggcatggactttaacactggattgcccaggacccaa

SEQ ID NO: 6688 - DNA, 417 bp, Triticum aestivum
  Clone ID: LIB104-007-Q1-E1-A2
cgggtcgaccggttcctacaacaaatcttatggaaattataataagatgccctctgattttgaatctaatattaaaggatttatttcttcgcaaaagaattttaatgctatgattgaagaaaaattgcttaagattgatgatttggctaggaatgttgatagaattgctcttgatgttgatgctttgaaacttagatctattccacctaagcatgatattaatgagtctctaaaagccatgagaatttcaattgatgagtgtaaagaaagaactgctaggatgcgtgcttccaaagatgcctttattaaatcttgttcttctaattcttatgaaaatcaagatgaagatctaagaattattgatgtgtctcccattaaatctttgttttgcaatatgaatgtagatgaaactgaata

SEQ ID NO: 6689 - DNA, 430 bp, Triticum aestivum
  Clone ID: LIB104-007-Q1-E1-A4
cgggtcgaccggcaatgcaaagtttgtcagcaaaagtcagaagaacctttggtagaccttggatgcagatgtcgtggtgatctttcaaaagctcaccgcacttgtattgatgtctggttccgtactagaggttcaaacaagtgtgagatatgccagcaagttgctgtcaacatacctcctccagagacacaagcaagtggatggtttagcccactctgggttgcatttgcaattctgattggtggtctattattggatgtgctgatatctgtttctcttggtgtttccgcacttcctgtgaacataataattggtgttctgattgttctcggcttgggcactgcccttcgactagctctcgagtgctgccaggagtttggctcgaggagaagcatgccaaggatggaaaacatggcacccagtggggtac

SEQ ID NO: 6690 - DNA, 275 bp, Triticum aestivum
  Clone ID: LIB104-007-Q1-E1-A6
cctttggtacaccttggatgcagatgtcgtggtgatcgttcacaagctcaccgcacttgtattgatgtctggttccgtactaaaggttcaagcaagtgtgagatatgccagcacgttgctgtcaacatacctcctccagagacacaggcaagtggatggcttatcccactcggggttgcaattgcagttctgattggtggtctagcattggctgtgctgagaactgtttcacttggagtttccgcacctcacgtggacatcataattggtgttct

SEQ ID NO: 6691 - DNA, 315 bp, Triticum aestivum
  Clone ID: LIB104-007-Q1-E1-A9
attcacgggccgacgggtaccggaacacgctcagcgcctacaacttcgaccgcttcaagcggctccataccaagatgatgaaggacgttgacgacatgctcgcctatgacattcccgacctgctcaagcagttcaggaacccctacgagtgagtcaactcaatgaccatggatggaaattccagaccccaattttatttctcgtggggttcagcggaaacttgaacttgaggtgtatgtatgttaactttgatcataacgctttgatgtactatataagtatcagtcaatcaatatttacatgacctcgttgatc

SEQ ID NO: 6692 - DNA, 404 bp, Triticum aestivum
  Clone ID: LIB104-007-Q1-E1-B10
ggtcaagaatatccgggtcgacgcggtatcatgaagaacatggtgctatttcaaagcacaagcgtggaaaagggatagtaacattgtcccttctctctttttctcccatttttttcattttttcaatttttcattttttttgtttgggattctttggcctctttttttatttgggcttctttggcatcttttgctcacatgggacaattctccaataatgatgatcatcacacttttatttacttacaactcaagaattacaactcgatactagaacaaaatatgactccatatgaatgcctcaagaagtgtacctggatgtgcaatgatctagcgtagccatgacataaaaaactggacaagccatgaaaacatcatgctagctatcttatgatcatgcaaag

SEQ ID NO: 6693 - DNA, 176 bp, Triticum aestivum
  unsure at all n locations
  Clone ID: LIB104-007-Q1-E1-B11
ggcggtgaccgagaccctgaactacaacaagcaacatancgtggacatgcaccggctgccccctcaggtacagaacctggtaaatggctggtaagacagaaccactgctgttagtagtacatagataggcctgtaatttgtgacactaatcctttttcctcctctccctgatgcaa

SEQ ID NO: 6694 - DNA, 171 bp, Triticum aestivum
  Clone ID: LIB104-007-Q1-E1-B12
gaggtgttcccttggggtatgttcgcccgcattcatggcctgcccaaagccattacctctgcaatttgtaggtcaaccactacgcttggtatctgtatgtgtaatgtgatcttggtactatacaacttgccacttcccgcagtataagtaatattgagcttctgaatgttt

SEQ ID NO: 6695 - DNA, 411 bp, Triticum aestivum
  Clone ID: LIB104-007-Q1-E1-B2
cgggtcgacacggcgtcgcaactgggtatatgtcacgtcagtacccccattcctatccaggagtgggaataggccctcagcgccttaattgcaccagatgcctgccgcgtcgtacttgcatcagacgcccgccacgccattcgccttgtccgcggaccgataggctcaaccgcctccttggcccaagtgtccaccgggcccagtggaggaacatgcccgtcgcattctcgagctggtgatctccgatgaaatagccaacttggatgaacgcctgcaaacacgagttcaggcagagccaagagctactgtacgcaacggctgctggtcatggtctcatggacgcgtttcattttgttgagtcgtttcgacgtggatagcaatgtatttacagcaattatagtattgctctgt

SEQ ID NO: 6696 - DNA, 415 bp, Triticum aestivum
  Clone ID: LIB104-007-Q1-E1-C1
gggtcgaggggctcgaagcgaactgctgcggcacattcttggcatgatctggagataggacctgaagcccctctaatcttcaatgccgttgttgagatcacaaaggggagcaaagtcaagtatgaacttgacaagaagactgggatgataaaggttgacaggattctgtactcgtccgtagtctacccacataactacggtttcgtaccacggacgctgtgtgaagatggagatccaattgacgtcttggtcctgatgcaggaaccagtcatacctggttgctttcttcgagctaaggctattgggcttatgcccatgattgatcagggtgagaaagatgataagctcattgctgtttgcgttgatgatcccgagtaccgtcatctcaacgaccttaaggagctctctccccaac

SEQ ID NO: 6697 - DNA, 375 bp, Triticum aestivum
  Clone ID: LIB104-007-Q1-E1-C10
gggtcgacggggtcggttacatgagcggcggctgcaagagtgatgatggaagtttgagttgtggatattcaagttttagaggaaaaagggcaaccatggaagacttctttgacataaaatcatctaaaattgatgataaacaaataaatctctttggaatatttgatggtcatgggggttcacgtgctgctgagtatttgaaggagcacttgtttgagaacctcatgaaacacccacaattcatgtcagatacaaaattagcaataagtgaaacatataaaaaaactgattcagatttcttggattctgaaatcaacactcacagagatgatgggtcaactgcatcgacagcagttctgcttggaaatcatcttt

SEQ ID NO: 6698 - DNA, 333 bp, Triticum aestivum
  Clone ID: LIB104-007-Q1-E1-C11
ggtacccgaggatacaccatgcaatagaccactcgggttatgttgccataggcgacacgcaaagcccgcactgtcagatgggaaaaccccaaacgtctttggacgatgtccagaaacggggaacttgaaagaataagaacacaaacatctgagccaccgtcagactcatcaacgtcggagccagcgttgtcaggcgcctgaatagcatgggatcagtccatcatcgaccgcagcttcacttcacttcagttcagctcagcatactatggagaccacggggaatgtgagagtactgacatatgacccaatcgcgacaaagccttgtgctgcaac

SEQ ID NO: 6699 - DNA, 395 bp, Triticum aestivum
  Clone ID: LIB104-007-Q1-E1-C12
gggtcggccgggcacactattcacaggcatcatacacccaccacataccttcctcaaaacagcaaccatagctacctatcatggcatttccatagccattccgagatatagtgccatgcaactttccaccattcctttcagtatgagacgctccatgattgtcatattgctatgcatgatcatgtagttgacattgtatttatggcaaagccaccattcatatttctttcatacaagtcactcatgagtcattgcacatcctggtacacagccagaggcattcatatagagtcatattttgttccaagaatcgagttgtaattcatgagttgtaagtacataaaagtgcgatgatcatcattattagagcattgtcccagtgaggaaaggatgat

SEQ ID NO: 6700 - DNA, 390 bp, Triticum aestivum
  unsure at all n locations
  Clone ID: LIB104-007-Q1-E1-C4
gggtcgacgggccacggcgatgtcgtcctaggaggaagcaagggatgcgcggcgcggccggggcggcgttgatgcgcgccgcccgtgctctctgcagatctgactganggtcagcaagttttggaagataatgcgcaaacttttaaattagtttcttcgtttattctcttagattgattctcttggggtagcactggtagctactccctccgttcggaattacttgtcgcagaaatagatgtatctagacatattttaattctagatacatccatttccgagacaagtaattccgaacgaacagagtaagttctaatgttagacatcttcaatagatgatttagatgtaaaaataaggaaaacgattgcgcgctcagtcggctgatgacc

SEQ ID NO: 6701 - DNA, 197 bp, Triticum aestivum
  Clone ID: LIB104-007-Q1-E1-C8
ggtcgacgggatcaacgaagggatacgggaagaccataacatgtatgtacggtcgatctatttcagaacgcatactatcggtctcgtacactcactacagttgtcttcgacttatgacgtcatcagtggtagcacggtgaccttgcttaacatccgtgcactcaacattatgcacgtttcactcgcatgcttgttac

SEQ ID NO: 6702 - DNA, 342 bp, Triticum aestivum
  Clone ID: LIB104-007-Q1-E1-C9
gaagaagatctaaaacgtctcctgtgaacggtacttcggtttcgggtgtgagatcgacgaggagacatccaacaaactggaaggcattcctggtgttttgtttgtgcttcctgattcgtatgttgatcctgagcacaaggactatggagctgagctttttgtgaatggggagattgttcagaggtctccagagatgcagagaagggtggagcctgtgccgcagagagcatcagataggcctcggtacaacgacagaacccgctaccaacggatgacggagaaccaatagcggtgatgagccgaggtgctcgattgaagatcaaataacaagccctggtggtt

SEQ ID NO: 6703 - DNA, 327 bp, Triticum aestivum
  Clone ID: LIB104-007-Q1-E1-D10
gtatgacagagaatatcgatatacgttattctacagtattactctacagatccatcagctctaagtaaactgcgtataaatcatgtatgtataacgtatgtgttactgatgttacaagttgagtccatgtgtgacggtgcggctgtaacacaacatgtgattcataatatccacatgcctcaccatgtaagaaatatgccctaaaaaacaaataataaagttgttaattaaaattccataataacatgataaatgtttaataaatcaatgctaaaattgtaaataaccgaaaacttaataaaatgtgtgaatacggccccccaaaag

SEQ ID NO: 6704 - DNA, 383 bp, Triticum aestivum
  Clone ID: LIB104-007-Q1-E1-D12
gggtcgaccggaggaagagaagaaaaagcagctatttcacctggtgtcgtaataaccactgttttcgggtttgaaggcataagcgcagcagagatcttctttcatttaagaagaagccaccgtaaagaagaggaaacaaggcgtttaagggacaccgactcccattattttctccaggcctgctttggctaaatcgacggaggcttagcttattatgtttcgggcgtttagctagcttagagaataaagaaatctatctctaaagggggagcggtacgactattttaggttagaggaaggttgaagagagaatagctaaaatagccagtcgggtaggcaagtgcgggtggctgtggtcaaagtgaatatgtcctgtttcggtt

SEQ ID NO: 6705 - DNA, 422 bp, Triticum aestivum
  unsure at all n locations
  Clone ID: LIB104-007-Q1-E1-D4
cgggtcgaccggatactaaaaaaagattgaaaaggatcaaattttgtcatatcacgaagaaatctatcccttccatagcaataacaagaattaaaaaaaagggaatgacaaagcatctgggaataaacgattaatttctatcaataaacctgctaaagcaccaaaccatagagtacttagcacgggtgctacagagagatatgtttttatatcccgcattgaaaatcctccttccttgttggaatacatatatgatcataaactcttgcccaagattgttatgctatatataaaatgaaccatatcgacgaaattttcctatccctaaaaaagaaaaagatgaccccttcttcctatatattaccaaggaaaagtaatccttcttttatangcgaaattatattggattttatatgtatata

SEQ ID NO: 6706 - DNA, 335 bp, Triticum aestivum
  Clone ID: LIB104-007-Q1-E1-D9
agctagataaaaaatcgcttccatttttgaagacgatggctgaggtttcagggtggcctttgaatagatatgaaacacttgctttgctaatcttttcttcggttcttgcagtggatctatggttttgggagtttctcgtggaaagcagtctgaattgggcatctttggctggttcctggatcgatcaatttagtgctccattttgacaaagagtttacaaaaccatttactgttgcagttagtttcagatattagttggagtgctgtctatgcaaacttgtagataacaatttattgaatcaacttggaatgagattagtgagaaagttgaagcc

SEQ ID NO: 6707 - DNA, 416 bp, Triticum aestivum
  Clone ID: LIB104-007-Q1-E1-E1
gggtcgacgggtctgccaaggtgacatcaccaaggtactcaccaagatggtgcactggaaccccgaccttgacttcgacgcctcgctggacagcttgccggagggtgtggacctcgcggcgctcagggagcgtatcaagcccgtcatcagccatatcggcggaatccagtggatagagggccagcaccgagattaggcaccctgtctcgcactgccgctgcaggttcctgaccaagacatttttatctttagttagaaccgcagcaacaaatgatgtaatataactctgcagtacttttgagacaatgcatgttaatttcctgtccgatcttcgctttgtacgttcaccctacgctaatcgggtaggcttgccggcgcgtaaacccagggcggcaccttgaggatggatccccaat

SEQ ID NO: 6708 - DNA, 337 bp, Triticum aestivum
  Clone ID: LIB104-007-Q1-E1-E10
gtcgtagaacgtcacagtcatctacgcccgcgccaagcagtacgccgacgagtagtaggcccacgacaatgagttggttcagcttaagcgtgaagcccggatgaagggtgggttctatgtcagtcctgaagcgaacctgctgtttgttgtcagattcacacgtatcagtgccatgcacccaaatagcaaaaagatctttcagctgttgcgtttgtgacacatattcagtggtgtgttcctgaacgttaacaagggcatcatcaacattcaccgcatggtctatccatatgttgcatatgggtacccgaacctgaatagtgtgagggagtttatctac

SEQ ID NO: 6709 - DNA, 275 bp, Triticum aestivum
  Clone ID: LIB104-007-Q1-E1-E11
aacaaaaaaaatagaaaaaaaaaaaaaaaaaaataaaaaaaaaaaaaaaaaaattaaaaaaaaaaagaaaaaaataaaaaaaaaacgggcggcccaaaagattcaaacttaacttacccttaaagtcaagttaaaacccctcaaaaattttcaccaaatttaaattaatgggctttcttttaaaaagttcttaacgggaaaaaccttgggttaaccaaatttaacccctttgaagaaaatccccttttcgcaatttggcgtaataccaaaaaggc

SEQ ID NO: 6710 - DNA, 421 bp, Triticum aestivum
  unsure at all n locations
  Clone ID: LIB104-007-Q1-E1-E2
ggtccagaaaatccgggtcgaccggggcgcggcaccagccactgaagccggggcgtctcagccggctccaggcgaggacttggaagccgctctgccaggcccgccgccaggaactccacctccgtctgcgatcacccagcaggagactccagcttctccggctgcggctccagaagatgatctgcctctgcctcctccccctccactgacccagcatgaggaggatggaacgccagaagatgatctgcctctgcctcctcctcctccactgccccagcaggaggctggagcgccangttcagcgccagaggcaggagccgtcgatgacaagtgggcaggaggtggcgatgacaagtgggcgggaggcccggatgacaagtgggtctagtggttgcttaaggcgtggaactgaactgaactg

SEQ ID NO: 6711 - DNA, 379 bp, Triticum aestivum
  Clone ID: LIB104-007-Q1-E1-E9
gtcaagaatatcgggccgacgcggagaagaagaagtccagcgagaacgtcaaggtcatctacgcccgcgccaagcagtacgccgaggagtacgatgcccaggacaaggagttggttcagcttaagcgtgaggcccggatgaagggtgggttctatgtcagtcctgaggctaagctgctgtttgttgtcagaatcagaggtatcaatgccatgcacccaaagaccaagaagatcttgcagctgttgcgtttgagacagatattcaatggagtgttcctgaaggttaacaaggccaccatcaacatgctccgcagggtcgagccatatgttgcatatgggtacccgaacctgaagagtgtgagggagttgatctacaaaag

SEQ ID NO: 6712 - DNA, 376 bp, Triticum aestivum
  Clone ID: LIB104-007-Q1-E1-F10
aagctaaagaacaccctgcgcaagcataactccaacaccgtgaacacttcccggactccgccgagaaggggccatcacggtaacacacacggttgattcattttaattaagtttagttcaagtcatctacaaccgggcattaacaaattcccatccgcccataaccgcgggcacggctttcgaaagatcgatccctgcaggggggtcccaacttagcccataacaagctctcacgatcaacgaaggaatagacctccacccaagacacaccgatcagactcggtaccttggtacaacaagatgattcggcaggttaaaacaagtccagcaacaccgcccgaatgtgccgacaaatcccgataggagctgcacatat

SEQ ID NO: 6713 - DNA, 338 bp, Triticum aestivum
  Clone ID: LIB104-007-Q1-E1-F11
gggtcgaccggtacggccactacggtcgctcgacgacgaagtcggcgaagaggagcggcggcaagaagcagacgagcaggatcgtcggcttcgtgaatatgcacttcgtcggcacctccttcccgccagctcgagcgacggatcggttggacgccagccgcgcgccctgctattcgtcatacaacgactacgagtacgcggcggagtggaacgctgtggttccggcgacggcggcggccgtggatgaggaggtggtggaggtgtgcgacgacacggcggagtgcgggtacctgtgttggctggaggaggagaggtcgtcgggtggcgtgccggcgggc

SEQ ID NO: 6714 - DNA, 442 bp, Triticum aestivum
  Clone ID: LIB104-007-Q1-E1-F2
cgggtcgaccggcaactgaagctctcaagtagtctaagtgaagtgaaagaacttactgcataatagatacaaacttcacagcaagatcagcacccaaagccaacaatctgaaacatattttgtcacagataagatatgttgctgattgtcttaatgatataagtttacaatcagaagccgttatacagaaaacaaacaagtattattggagcctggatgatgacatcgaaggaatttctgctttgagcaatgcaggccatgaagaacaacaactataaagacttgccacaaagaaattgttctaaacatccaacgatacatgtgtctaacatagctctttctatctacatgccttgctcataatattgtaaatgatcgttcgtaagcttattagaaaacatgtatcatcagcaaccatccatccatcatcaattcaatactt

SEQ ID NO: 6715 - DNA, 426 bp, Triticum aestivum
  Clone ID: LIB104-007-Q1-E1-F3
cgggtcgaccggtcctatggagccatagcacgacgacttcccgactatcttccaacttagtatgatagaagactttaaaattctcttttgggaaacaaagtgcaagtaagtgaataaaatttcctttgtcccaactgtttaagacaaacaaatgaaagctaaactcctctgagacctcttttagacacttcctatggatacgtagtagaaacaatcataactttctacaacaatatgtagaaagtgttactttctctattctcattaagaaacattagtaacaccaattttatttacactttttttgaacatgtcatttacactttaattagatgtatatgttccttttttattgctaaccggtccgaccgatgggtgatgactagtaaaattcattaagtaaaattcgttttgtcaaatcaagaa

SEQ ID NO: 6716 - DNA, 386 bp, Triticum aestivum
  Clone ID: LIB104-007-Q1-E1-F9
ggtcagaataccgggtcgacggggatgaaagatgccggcgccgacatgccactaagatcccataggctcgttgtgcacgtccctgctcttcctgagggcaccgctcgggcctcaacatagcaggaacagcggtactgctggataggcgaaagagatggcattttcgatctgaccagactcatccttgacattctcatatataaagatctgcggttgactccagctccggcaccattgatggtgtgagctaattttcgttggtcaacgctgtaggttctacagtgctaatgcgaaaatctgagatctgaaaatgtcactgcttcccgtgtgataccctaatcatccatgcagttggtgacttaatcaatccgatggaatttgctgct

SEQ ID NO: 6717 - DNA, 402 bp, Triticum aestivum
  Clone ID: LIB104-007-Q1-E1-G1
ggtcgagctatccgggtcgaccggggacaagacggcgttctgggagccggaccccaagaccggcgactaccggccggtgaccagcaccaaggaggtggatccggctgacctgcgtgcagagatgctcaagcggaggttgctgcagcagcaatgatgcgcgtgctgcaaacacgctaccggcccataggttcataccgtcatgtacaacaaaacgttaacgggcgtgctaaactatatttactaggtgccatgtcggacaacgacttgtcaggaaattgcttcctgtaagtatgtaagtcttcaacagacacttacatatttacttgttctacgcaaatcgtccaaaatttcccagtggtttcgcacaccacgacaatatttcagcacaaaaaaaaatgaaaa

SEQ ID NO: 6718 - DNA, 366 bp, Triticum aestivum
  Clone ID: LIB104-007-Q1-E1-G10
acggggggatgcatcaaaaggcatcccctctttcgtcttcgtctatcggtaactttacttggagcaatatttttgttcgccacatgatatgtgttttgcttggagcgtattgtatgatcttagtgtttgctttttatattaccacaatcatccttgctgtacacaccttttgggagaaacccacttgattggaatttattagaatactctatgtgcttcagttatatctttggagctagatagttttgctctagtgcttcacttatatcttttagagcacagaggtggcttaattttgtagaaattgttgatctctcatgcttcacttatattattttgagagtctcttagaacagcatggtgttt

SEQ ID NO: 6719 - DNA, 378 bp, Triticum aestivum
  unsure at all n locations
  Clone ID: LIB104-007-Q1-E1-G11
gggtcgaccggaacactgaagaagcanagagaacactggcccgctttcgtgagaattcaaggaacaaaattaccaaaggaacggccaaaaaaaaaaaaggcaattgccgaaaaaattaccaatttcaaaaggctggttcaaggtggcaacccggtggcaatgccaaattggaataagtctgagcaagagatggaggatgcaggggtcactccggttactaagagctggccccccaggtgcagaacttggttctatgcgcatggggggacgttggacccgaagacaagcctagtttcgaagaangcaagtctaaaangagcagaacaaaagttacttgacgcaatagaagatgctcgaaagggggtgttcacgcccaac

SEQ ID NO: 6720 - DNA, 375 bp, Triticum aestivum
  Clone ID: LIB104-007-Q1-E1-G12
gggccgaccgggggtccaactgtatgagttcatccctggaagacgtgattcgtcagtttgtccccgtgaagggcgccttcctgatgctaagaaaggcgcaccacatctgagggacatcttttatcgaatgggcttaacagacaaagatattgtagcactatctgggggccatagtctgggaaaggcgcatcctgaaaggtctgggtttgacggtgcatggactcgtgatcctctgaagtttgacaactcatactttcttgagctactgaaaggggaatcagagggtcttctgaagctccctactgataacgcattgttggatgatgctgaatttagacgctatgtggagctttatgcaaaggacgaggatgcttt

SEQ ID NO: 6721 - DNA, 425 bp, Triticum aestivum
  Clone ID: LIB104-007-Q1-E1-G2
taaaatatcaactacctgatcatgcaaaaaccattatgacattaatggaacttgtcataataaatgaaacggtgaaaatttgcatggcaatatatctcaaaatggctatggaaatgccataataggtacgtatggtggctgttttgaagaacgtaaataatgggtgcatgataccggcgaaagttgcgcggtataatagaggctagcaaagtggaaggatgagtgtgcgtatatccatggactcacattagtcataaagaactcatatacttattgcaaaagtctacttgccctcgaagcaaagtactactacgcatgctcctaagggaagggttggtacgagttaactatcgcgcgatcccgacctccactcataaggaagacaatcaaaagagcaactcatgcaacaaatttgtcacacaact

SEQ ID NO: 6722 - DNA, 372 bp, Triticum aestivum
  Clone ID: LIB104-007-Q1-E1-G3
ggtcgaccggggatccgactccactgccgcctatctttaactacatgttgccgtgctgtcctgttttggaaacttgtgttgggttgttaagccgtcggtgctttctttgtcgctgttgaactgcatcattagtacttcgtggaacaagtatctcgcttaatttgttctgtcctgcccggtcctgtctttgctcttggtgatcggatcataaaaaaacaaaaaacatttctgaaaagacacaattaaaagatatatgccaaatgatactaacaactatcatggtactatgaactaaaaattaggaagagaacggatcaaatgtcaattaatacatgatcaaagggggccccctaaaggttcaaaccttattta

SEQ ID NO: 6723 - DNA, 426 bp, Triticum aestivum
  Clone ID: LIB104-007-Q1-E1-G4
cgggtcgaccggatatccaatgtataatttcccttcgtgcttaccgaaggatgattgctatgatgattgttatgatcccgttgattcttttgaaatatccctttttgatgatgcttgctatgcttgtggccaagatgtcaatatgaattatgcttatggagatgaacttgctatagttccttatgttaaacatgaaattgttgctattgcacccacgcatgatagtcctattatctttttgaattctcccgactacactatattggagaagtttgcccttattaaggattatattgatggattgcgttttactactacacatgatgattttgatagatataatatgcatgtgcttgctgctcctacttgcaattattatgagagaggaactacatccccgcctctccatgtttcccaatatgataa

SEQ ID NO: 6724 - DNA, 420 bp, Triticum aestivum
  Clone ID: LIB104-007-Q1-E1-G8
gacggggtgcgcgatctgggcgcggctgctgcggacggttggggtcaaggtcggcgggaaccctaacgtgtacgcgagcctccttggggttctgtggtcttccgtggcaaacaggtggcacctggagatgccagacattatagatggctcgatttcgatcatgtcaaggatcggccttgggatcggaatgtttaacacgggcctgttcatatgtctacaggacaagctcgtcgtgtgccggactggacataccgtgttgggcatggccatgaggttcgtctctgctccgggatccaccgctgtcggagcgctacttttgggactgcgtggtgaccttttgcgtgttgccatcttacacgctgcactgcctcagtctgtcggagcatttatcttcgcgctagagtatgacctgcacgctga

SEQ ID NO: 6725 - DNA, 379 bp, Triticum aestivum
  Clone ID: LIB104-007-Q1-E1-G9
ggtcaagaattaccgggccgactatcacaatgaccggggtcttgtcgcgaatgatccgcatctccatactcagcgaaaatagccgaacgaaggtgtagtgcagcggatgaaggttaaacatagcaaagatgtcatcaaaccgcaggacgatcgtacccccgatgtcgccatccacaaagcccttgccctctggcaccttggccacgaaaaccgggtatgccacatccttctctctgagacgccgcttctccaaagaaagaacactgtcgtgcagactcctcctcgagatatcctgcggtgaaggtggcccgtcctgagcacggatcgtactcggtgccggctggctcgcacccttcttagtctttcttttgtgtgcctt

SEQ ID NO: 6726 - DNA, 391 bp, Triticum aestivum
  Clone ID: LIB104-007-Q1-E1-H1
cgggtcgacggggttgatggagtcatactcgtcgtgattcaaatcaccggagatcctagtgccgaacggacggcacctccgcgttcaacacacgtgcagcccggtgacgtctcccatgccttgatccagcaaggggagagggagaggttggggaagactccgtccagcagcagcacgacggcgtggtggtggtggaggagcgtggcaatcctgcagggcttcgccaagcaccgcgggagaggaggagggagagaggcagggctatgccatggagaggtcaaaactcatgtgttggcagccccaaagtcctcaagtatatataggggagagggaagggggtgccccccctttagggtttcccacccaaggggtgccgcagccccaaacccat

SEQ ID NO: 6727 - DNA, 367 bp, Triticum aestivum
  Clone ID: LIB104-007-Q1-E1-H11
aatgaacagcgacagcaagctccaaaacatgagctggttctgctacacacatgtgaacacgctgccccagacaagcatgaccacgtagtagtcttataataaaaacactaccgagttcaggtggggaaccctcgtcgaggatatcgaagtctttacgcaagtccatggattagatcccaagcatagacttctcttccttgaacaagtcaatcagtggcttggtgtgctagggacacatatagaatggaggtagcgagcctatcaaaccataccatacttcgcacatgcatgactgacttgagatggttccagaggaggcaacattgactttctcgaattcacgacggcaacttgcatcaaatgcaca

SEQ ID NO: 6728 - DNA, 336 bp, Triticum aestivum
  Clone ID: LIB104-007-Q1-E1-H12
ccatcgtctctggcgccaccgtctatggctacagaggaaagagcattaagtctgccctcatcggtggttctagcctggcattcacatctgccattctggacgttggcggtaacactaccagagtggacaatggcaaagcgtaccatgcatacacaacggaaaagaagcccgaacctgcgcattgatcaaggttgtctacttgtagcacaaatcatgcaaaccagctcggtgaatttttgagctgatgtgtgctgttatgtctgttttgctgatgcacctagttcctttgcaaagctgtagtaacttgttttgctcgagggcaatacaacagacctg

SEQ ID NO: 6729 - DNA, 344 bp, Triticum aestivum
  Clone ID: LIB104-007-Q1-E1-H2
ttccgttcaaaaaataactctcccgaaggtttcattctgtttggactctgtttgatattccttttctttgaaacactgaaaaaggcaagaaaacaacaatttgggctgggcctccggttaataggttagtcccaaaaataatataaaagtgtttaataaagcccataaacatccaaaacagataatataatagcatgaatacttcataaattatagatacgttggagatgtatcactttccttctgattagattgcttttccatctcttctcaagtacttgtagcacaaagacctgttttgaagcgttgtttttctagttttgcttgctagtaaccggcttgat

SEQ ID NO: 6730 - DNA, 372 bp, Triticum aestivum
  Clone ID: LIB104-007-Q1-E1-H3
cgggtcgaccggagacacaatggagtacgaacggttctgcaaaatgggcctacggccttctctcaaggacatctgctggaacggtccgtcagaggaaaagcttccatcagtatcggagtcagtacctccaactccgtcctccaagtcgaccaaaagaaatgtcatttaagtgtgatatcttccgagctgcaattacaatctattctcctctctctttcttccctcctcaaagagctgagactttgctcacttgagtatcaagctttagggctctttgttaatcctttttgcagtttcccttttgtggtagcaattgtagtatatggatttcctgttttgttcaccaatagaagcacaaaaggtgacagtaca

SEQ ID NO: 6731 - DNA, 439 bp, Triticum aestivum
  unsure at all n locations
  Clone ID: LIB104-007-Q1-E1-H4
gactataaacttacaagataggatcaagaactcacatatattcatgaaaacataatagattcagatctgatatcatggcactcgggccctagtgacaagcattaagcatagcaaaattatagcaacatcaatcttagaacataatggatactagggatcaaaccctaccaaaactaactcgattacatgataaatctcatccaacccatcaccgtccagcaagcctacgatggaattactcacacacggcggcgagcatcatgaaattgttgatggaggaaggttgatgatgacgatggcgacggattcccctctctggagccccgaacgaactccagatcagccctctcaagagagatttgggcttggcggcggctccgtgtcgtnaaacatgatgaatccttctctctgatttttttctccccgaacgtgaatatat

SEQ ID NO: 6732 - DNA, 399 bp, Triticum aestivum
  Clone ID: LIB104-007-Q1-E1-H7
gtcgacgggttgaggcaactggcttgtactatgatgcttgtatgacgtatttacgttttagagttgtgttgtgatatcttcccgtgagtccctgatcttgatcgtacacgtttgcgtgcatgattagtgtacgattggatcgggggcgtcacacaaacaagatttcaagtgaccgaacaatagcacaagcaattaccatacgaactccactttaactttgtaacacaaacatatgcacaatatacacccattaacccgacagttcttgcgccgacgcataagcaagacacaatacatactcgttaaccgtgataccaagagaacaagaaaggttaatcacttaaaaatcgaatagttgtggtggtgtcaccttaaagaacaaacggacaaaaatgaaag

SEQ ID NO: 6733 - DNA, 414 bp, Triticum aestivum
  Clone ID: LIB104-007-Q1-E1-H8
tcgacggggtcagttagatcttctacagaatatagtcctcatcagagatcccgaggactccacaaagtactatccccgctttaacctggaagatacttcaagttttagggacttggatgaacatagcaaaaatgtccttagaagattataccatgactattatttcgttcgccaagaaaatctttggcgacaaaatgcactgaagactctacctgttctattgaactgttcggatatgttggcatgtggggaagatcttggccttatccctgcttgtgttcaccctgttatgctagaactcgggttgattggattgcgtatccagagaatgcctagtgaaccaggcttggaatttgatattccgtccaagtacagctatatgacggtttgtgctccctcatgtcatgattgctc

SEQ ID NO: 6734 - DNA, 384 bp, Triticum aestivum
  Clone ID: LIB104-008-Q1-E1-A11
gtcccgggccgacggggaccgcaaaatggaatgcctccaagagccccgcgtactacaagcgcggggactatgtgcccggattgaacgttgatggtatggattttcttgcagtgaagcacgcttgtaaatttgccaaagaacatgttctggaaattggaccgattattcttgagatggacacatatagataccatggacactctatgtcagatccaggcagcacttaccgcactagagatgagattgcaggaataagacaggagcgtgatccgattgagcgagtcagaaagctattattgacccatgacttggcaacagcccaggagctcaaggacatggagaaggaaatcaggaatgaagttgacactgcaattgccaaaacaa

SEQ ID NO: 6735 - DNA, 126 bp, Triticum aestivum
  Clone ID: LIB104-008-Q1-E1-A2
ctggtgtccgctttgatgcagaaaccaagatgggaatggaaacattttatggttatatacaggacatatgggaacttgactattgacgtggtttgacggtccctttgtttcggtgcatattgggtc

SEQ ID NO: 6736 - DNA, 329 bp, Triticum aestivum
  Clone ID: LIB104-008-Q1-E1-A3
tttgacacgggcaatggccatccgcgagccttctatgaacgacgacctcttcatcgcattgatgcgcgacaccgcaccaaggaactgctgcactaagctgaaatagctgttcggcttcggcttttccggtcacagatgatctacgacgaacctcatggcaagtccggacaatctattgagttcggcccattcggcaagctaatcagttagtggaagtggatgctctggaacgttaaactgcgaccagaatagcttgtccacttcacgacctgtttgatctcggaagtattcggccgcatcgatagcactcgccgtcaaatccggatatg

SEQ ID NO: 6737 - DNA, 342 bp, Triticum aestivum
  Clone ID: LIB104-008-Q1-E1-A5
acaagctgaaaaggaagacatcctaaggcagctgaaggagctcgaagagggaatgaccactgaagagaagaagcctgtacagatagtggaagcgagtggcaaggccaagtccaaggaagatgatcttgttactgcaccctgatcttctggaaatctttgacttgttgacacttgctgtgattttatatggttgtaacgcgaataatttctgatctgggtacgtgcacacgtttctgtgtgcagtacagaactccctctatatacatatacagcttgagtgtaagaatataaacgcccagaaaaataaaataaccacataaaccaaaaaaaaatgcgtcggct

SEQ ID NO: 6738 - DNA, 239 bp, Triticum aestivum
  Clone ID: LIB104-008-Q1-E1-A7
ggcatcgatttctagatggttgggaggataagatatgcagcagcacagttcttttgtacgctcttggtatttcttcagttctttcgtcttcagattttctgctcaaaatcgccggcgcctctgcgcgctgctagtgtgatatggtaatgtacatatgagttttaacatgatatattgtggaactttttgtcgcaaaaaataaaagcaagatttcagattcaatgttcaattctcaagat

SEQ ID NO: 6739 - DNA, 380 bp, Triticum aestivum
  Clone ID: LIB104-008-Q1-E1-A8
gacgggaaagaagatcgtgaataatgagaagattcaggtctcaggtgagatcgatggggaagatggctcgctacacaattatatctgggaatttagagttgttagtttaccgtgctgctttcttttttgtgggtagatctaatgtctctacgtataatagataccgagtgtatgctggtggttctttccattcttttgaggtcgtgggtgccatgtaaatgtttgtggattccttatgtttttgcctcctgcggtaaataaaagctaatgcagattcgtggtcgaaaaaaaaacttaaaaattaaattcatagttaaaaacaataaaaaaaataacccaaatgaagaagttcaacaaaaaaaaaaagcggccgccccaaa

SEQ ID NO: 6740 - DNA, 385 bp, Triticum aestivum
  Clone ID: LIB104-008-Q1-E1-A9
ctggaatacaaaaagtgtccacggagccgactgcttagcaagaggtggtacagcgggaaggtacctaaccagaggtggcgatgctgacagttagcagtctgcctatgctggtggaagctgcagtctaatgcgacaagatatcagcacgccgaccccgcgcaaaggctacatcacagccttctgatccgatcgagatgaccaattcactcaccggcgcaagccttcaggagatgcatcaggatctaacgattggcaaaccgctcgccagaacagatacgtttatatagttcataacttcactcgcacgcatgaaatggactgcacgaatagcacattccagtgagtgttgacgtcccatggactgatatagcgggcagccgggcaa

SEQ ID NO: 6741 - DNA, 382 bp, Triticum aestivum
  Clone ID: LIB104-008-Q1-E1-B10
ttcccgggccgacgagcacctgatgtgcgacatcgagggccaccacctcgcctccgcggccatcctcggccacgacggcaccgtctgggcccagagcgccgacttcccccagttcgcgcccgccgagatcactgccatcatgaaggacttcgacgagccggggcacctcgcccccaccggcatgttcgttgcaggtgccaagtacatggtcatccagggtggacctggcgctgtcatccgtggcaagaaggcctgtagggagcaggaggcatcaccatcaagaagaccgggcaggcgctggtggttggcgcctacgaggagcccatgacccctgggcagtgcaacatggtggtggagaggctcggcgactacctcgttgaac

SEQ ID NO: 6742 - DNA, 328 bp, Triticum aestivum
  Clone ID: LIB104-008-Q1-E1-B2
gcttcacatataattgttagagcgcgggcatatcttttgtagaaagaattaaactctcttgcttcagttatatctttttagagagataacaggaattggtcaatcacatggttagtcataaattcctacataaacttgtagatcgttgaatctgatatgtttaatttcttgcaatagttttacgatataaaggtggtgatattagagtcatgccagtgggtggttgtggattgtacagacacttgtgttgaggtttgcaagtcccgtagcatgcacgtatggtaaccgttgtgtggcaaattgaagcatggggtgttccttgaatgtc

SEQ ID NO: 6743 - DNA, 365 bp, Triticum aestivum
  unsure at all n locations
  Clone ID: LIB104-008-Q1-E1-B3
ggtcgacgcgtacaacacaaaaatatataaatagttcataataatgacaatgaaactatatttagttcattgcaagaacaaggagacaatcctattataatttattacattgtaaaaacatcttggaccagtacgttgggatggcatggtgtgtaaacagggaaaggtatactaaggcgagaggcatagatgcgaccaacgagccggccaaaaaaaaccattgccaaccgtgcacgcgaagagcagtgatttaattgatgtaccaacaatcactcagatagaaatggaacatacacacacaaatagatgtgaaacatgcgtcacccncaaaagtgccaccgaaatgaaaaaaagagccttgaaaa

SEQ ID NO: 6744 - DNA, 344 bp, Triticum aestivum
  Clone ID: LIB104-008-Q1-E1-B5
gacgggtacatcaagcaccataacgacgccggcgtgggcatgaccgactacggcctcgacaggggcggcggccccgggctctgagtgagtgaggctttgtgttgctttgcttgttgtgaactgggctgggaggttgctgtatcttgtgtgtgcctgaagctttatgcttccaggatgtgatggtccgagcgatgcggaaacggtactgtaactgcatcatatgtttatggtgtcgatcgccttgggtgatatcatcttcggggtgtactctataaacaatggtgcttgagctgtcatggtaaaagtaaaacattgcggtgtaatgctgcatttcaaatgcgggt

SEQ ID NO: 6745 - DNA, 274 bp, Triticum aestivum
  Clone ID: LIB104-008-Q1-E1-B6
gacgggaaccgcgagagcccgtgccccagcactgctgccccttagtctccggatcatcgtcatctccgcctgtgcgccgtcgccgcgggtctctgccgctgtccacaagattcctcttcgccattgtcgcaccatgatatgctactgttgatactcgaacctcagagcgaaactgtgctgtgaatcctgtgaaaaaacttacataaagaccagtatagttatgtgttgtgaagttttcaagttatgggtagtccttttaaggactatggaataa

SEQ ID NO: 6746 - DNA, 213 bp, Triticum aestivum
  Clone ID: LIB104-008-Q1-E1-B9
acgggaaatggaagatagtatcgacatatgttattctacaaaattactctatagatgcaacagctctaagtaaactgcgtataaatcatgtatgtagaaagtacgtgtaacagttgttagaagttgagtccttgtgtgatggtgcggatgtaacacagcatgtgattctaatcatccacatgcctcatcaatcagtctgtacggataacccac

SEQ ID NO: 6747 - DNA, 315 bp, Triticum aestivum
  Clone ID: LIB104-008-Q1-E1-C1
gggtcgaggcgaaaatatagtccatgcattggaagatttactggctcaagcagaagttgctctatgcttctgctgtgtcaagcattagcttagttgcagccttgctggaaggatggattcaggtgtgcaagattgatgatgtacctgcaaacggcttcgttaattttaggaaggatggagtcgtgcatggactggatcctaaccgactgacatgaaaacttgaggctattacacggattcagctttgaaacacggctttgaagtccgaggcgtgccttatgattttttgtgggctgggacgataggttgtactgt

SEQ ID NO: 6748 - DNA, 373 bp, Triticum aestivum
  unsure at all n locations
  Clone ID: LIB104-008-Q1-E1-C11
tcccgggcagacggggaacacaggaagaaggacggggagcacaagaaggacggcgagcacaagaaggacggggagcacaaggagggcatgatggagaagatcaaggacaagatcagcggcgacggccacggcgacggcaagaaggacggcgagcacaaggagaagaaggacaagaagaagaagaaggacaagaagcacggcgagggccacaaggacgacgacggccacggcagcagcagcagcgacagcgacagcgactgagccagctccggccgcgtgcagtgcaggggagatgaacgcgtgggttaatttggagcgtgtggtagcatatgtatgtaatgcttgacatgtctcatggatcntgtaatgtaat

SEQ ID NO: 6749 - DNA, 271 bp, Triticum aestivum
  unsure at all n locations
  Clone ID: LIB104-008-Q1-E1-C2
gggtcgagcgcgaagctccaacggaggcagccctgcttccaagaatcacaaggtcactctgtccgggctgctcaacatggtggacggcctctggtccagcagcggccatgagcggatcctcatcttcaccaccaaccacagggaccggctcgacccggcgctgctccggcctggccggatggacatgcacgtccacatgggctactgtggcttcgtcgccttcagggagctcgcggccaactaccacggcatccanngacacccgctcttc

SEQ ID NO: 6750 - DNA, 364 bp, Triticum aestivum
  Clone ID: LIB104-008-Q1-E1-C4
atctcacaccttctaagatcaaaccagccactcacagatgatcactgtcagtattttctctaccaagtgctccgaggattgaagtatgtgcattcagcacaggtcttgcaccgggacctcaggccgagcaacctgctgctcaatgccaagtgtgaactcaagattggagattttggcttggctaggaccaccactgagactgacttcatgatggagtatgttgttactcggtggtacagggcaccggaactcctgctcaactgccccgagtacactgcagcaattgatatccggtcagtgggttgcatcctcggtgagattgctacgagggaaccactgtttcctggaaaagattaagttcaac

SEQ ID NO: 6751 - DNA, 326 bp, Triticum aestivum
  unsure at all n locations
  Clone ID: LIB104-008-Q1-E1-D1
atctgacgaggcaatggagagcgtcgagaaccctggctggtgcattgccaaagccgtggggtacctgattctcggtgctaccatttgtgccgcatttgcagacccgctcgttgatgctgtccacaacttctctaacgccacacacatcccgtccttctttgtctcgttcatcggcctcccgctggcaaccaattccagcgaggctgtctcggccatcatcttcgccagcaggaagaagcagaggacttgctcccttactttctcggaggtgtacggcggtgtgaccatgancaacacacggtgcctgggcgtgtccttagcgctca

SEQ ID NO: 6752 - DNA, 142 bp, Triticum aestivum
  Clone ID: LIB104-008-Q1-E1-D2
acgacgtgatgtcgcacgtaaagatctcggtctggattatcgaggaagtcatctcatgttcggatacctatagtgcctacttccacacagacgccattcatctacttccacgctcactcatcttgacgcatccttcaggttc

SEQ ID NO: 6753 - DNA, 72 bp, Triticum aestivum
  Clone ID: LIB104-008-Q1-E1-D3
ttagaaattgtaaatatgcattgttgtatcgcgacctgaatgaatgaaataaacgaaataacgctcttgttc

SEQ ID NO: 6754 - DNA, 296 bp, Triticum aestivum
  unsure at all n locations
  Clone ID: LIB104-008-Q1-E1-D4
agcacaaagagaagaaggacaagaagaaggacggggagcacaagaaggacggcgagcacaagaaggacggggagcacaaggagggcatgatggagaagatcaaggacaagatcagcggcgacggccacggcgacggcaagaaggacggcgagcacaaggagaagaaggacaagaagaagaagaaggacaagaagcacggcgagggccacaaggacgacgacggccacngcagcagcagcagcgacagcgacagcaactgaaccagctcccgccgcgtgcagtgcaagggagatgaa

SEQ ID NO: 6755 - DNA, 317 bp, Triticum aestivum
  Clone ID: LIB104-008-Q1-E1-D7
ccgggtcgacgggggcctacagctgaacatcctcatgacaattcaacatacccctgccctttcggaaagggaaggtttcccactcatggacacctagctgaatgcctgaacctgaacctcgtttttcttcttcttcttcttcttcttctccttggtaattccttgttgattccttctgggcatgctatattattgggtgcaacaacaaattattgtccttgttttgatttccttcctgtcaagttcatcctttagtgctagtactagtggtacatcagtttgatttaggaaaaacacaagcctctgcttaacattaa

SEQ ID NO: 6756 - DNA, 427 bp, Triticum aestivum
  Clone ID: LIB104-008-Q1-E1-D9
aattcccgggccgacgggactgccagctccctcctccccgcggctggctctgctgccgcgcaggcctcaccgccccaccgtactcccatcgctggcctagccatccctctactcacccacacctgctgttattctccggcgacggcagacgaaccagtaaaccctcgtacagtcgtactcccctccacgtgggaaacaactgcagagtcttccctgcctccgtgtcgttcctttcctaggcctcaccgtcgtccaccgccctggtgctctcggcgcggccttatcaacatggtcaacgactgacatgcatctgaagtggactgtacgtggagaggccgacagctgggtccacgaccgcacgcaaggaaatgcctccttaataagccgcaaaatatgaatctctcaacctgacatcagggacccaccg

SEQ ID NO: 6757 - DNA, 155 bp, Triticum aestivum
  unsure at all n locations
  Clone ID: LIB104-008-Q1-E1-E1
actccctatagtacgtcgtattaagcctcgtcncagtggggtacttggtcctgctgatgtagacttctgtgactcgctcgggtgcgaggctggagggcgtctgcagctccagcaccgtgggggtgtgccaaggtgccggagtttacttggggggt

SEQ ID NO: 6758 - DNA, 407 bp, Triticum aestivum
  Clone ID: LIB104-008-Q1-E1-E10
gtactagtctagaatgcccgggccgacggggatgatattgatatggcagtttcatgcttccccgaaatgctggaaagaagaagtggcaatcaggttggtagcgctcttgaggtgcttgtgtatgggctgtgcaggaagaaagaagcaaaggaagcgttcaaagttctgaaggacctggtgttggaaaaggatgtggttccttggcaaagtacctacaagtatttgatccacaagttgatccgccaagggcatcttaaagaagcatttgatgtgctaggtttaatgaaaagtaatggatttccgccttatatcaatccatttatcacacacattttgaaatctggtactgtggacgatgccctgggtctgctaaacgcaatgtcttcagaggagttcccatcaagaac

SEQ ID NO: 6759 - DNA, 279 bp, Triticum aestivum
  unsure at all n locations
  Clone ID: LIB104-008-Q1-E1-E2
ggtcgacgggtaccttgaagtgtcttttgttttctttcgctaacggagctcacgagtttcctatcttgagttttgtgttgtgaagttttctagttttgggtgaattcttttgatagatcatggtacaaggagtggcaagagcctatagcttcggattcncatggcgcccccaagataatccaaggacaccaaaaattcttgtattatttggggatgcnccgaaattatcncctctttttcgtcaacttccatcggtaatttactttggagctataattt

SEQ ID NO: 6760 - DNA, 273 bp, Triticum aestivum
  Clone ID: LIB104-008-Q1-E1-E3
catcctcattttataaaaaaaaaaatctctcgttcatggttcatgaccacgaaccatgcaagtacaggggtgtggataagcttcggttttcgctccgcttgaagttggacgtgaaagacacccgatgagatagcctcatgtgccggcgagtaccacgcacgttgggtggagttgcataaaagaaaggcaatgtgctaaaggtcttctctattttttttaatactggccttcttctgtttttacattcttccctagtttgataatgcttctttt

SEQ ID NO: 6761 - DNA, 436 bp, Triticum aestivum
  unsure at all n locations
  Clone ID: LIB104-008-Q1-E1-E4
cgggtcgacgcggataaggatcaatcggtattgcaagcatgtgatattcgtccactccctttgactgttcatcggcccaccttgaaagaagcgaaacgcgtatacaataacctaacacagctctattatgagacggaatgttctattatgggtgaagtcttaccccttgtggaaaatgtgacaaagtttgagcaaagtacagaagcaagggaagagaacagtgtggcccctgaggaacctattttggactcatcagattcgcatgaagcaatggccataccatctaataatgcaacaacaactctccatgaagctgcaaaagctggcaatgttgaacaaactatggaattgctccagcaaggtttggattcntgtatcaaagatgaaagaagaaagacaccttacctgctggcttccgacaaagaagtagaaatac

SEQ ID NO: 6762 - DNA, 315 bp, Triticum aestivum
  Clone ID: LIB104-008-Q1-E1-E5
ccgggtcgacggggacgccaatgaccaggccatccagtggctggacggcaaccagcttgctgaggcagatgagtttgacgacaagatgaaggagctggagggcctctgcaaccccataatcgccaagatgtaccagggtgccggagctaacatggcgggtggcatggacgaagacgatgcacctccggctgctggcggcgctggccccaagatcgaggaggtcgactaagcgagcacttgtaccagtcttaccctaaagttattccgttcgttatgttggatgctactgcagtacgtggtgttggatgtgatgtg

SEQ ID NO: 6763 - DNA, 386 bp, Triticum aestivum
  Clone ID: LIB104-008-Q1-E1-E7
cgggtcgacgccgaatggaaagtgtgcagaggatgcaaggatggacgcccggggtgcgtcttcgtcgaagcgacgtaatgctggcagtggtctgttcacgatcgccaaacgtatgagaaaataattggcttactcgtagtgtatcatgcctgtctgtcattatagcatgttccgttcaagtttatgtgtagctcacgtttcgacattttgcttggcaaccctgtagtgcatcacttgctactgcttttctatagatctgttcgcgtgcaaaaaacaaaaatacaaacagaaataaaaaaacaaaaaaaaaaaaaaaaaaataaaaaaatccaaaaaaaaaacaaaaaaaaaataaaggaaaaaaaaaaggaccacgtcaagaaaaa

SEQ ID NO: 6764 - DNA, 337 bp, Triticum aestivum
  Clone ID: LIB104-008-Q1-E1-E8
cgggtcgacggggtactgaaagacaagaagaagccgatcatcttctcgatggctaggttggaccgtgtcaagaatatgactggcctggtagaaatgtatgggcggaatcctcgcctacaggagctggtaaacctagtggttgtctgtggtgaccatggaaaggtgtccaaggactacgaggagcaggcagagttcaagaagatgtttgatcttattgaacagtacaacctgattggacacatccgctggatctccgctcagatgaatcgtgttcgcaatggtgagctctaacgctacatctgccaaaatgaaggaacctttgttcaacctgccttcc

SEQ ID NO: 6765 - DNA, 320 bp, Triticum aestivum
  Clone ID: LIB104-008-Q1-E1-F1
gggtcgacgggcctaaacactggctcaaaggtttctttcaagaatcatgagagaacattcaaggagtggattatttggaaattagaaccttcagatttcttagaacttcacttggatttatgtgaatataagcgtaagaggtctagtggcaatgctacaaaatcactgcaggcgatataataacgttgtagatagacggagactgaatcagttgacactactttgatgtctatcgagccaatgggacaacatagaatagaagaaccggaagcaggttatctatcttcacgagcaagttggcgtctgtaaaccttcaccgg

SEQ ID NO: 6766 - DNA, 370 bp, Triticum aestivum
  Clone ID: LIB104-008-Q1-E1-F10
gacggggaacctatgggtctgcacaattacttttcaggttctttatttttattttatatattatttttaccatttcaaaaaagaaatgtaaggacgaaatagaactgccataaactttaagaaattgttagtgtatttcaaaaatgttcaacatgtttttggaaaatgtttcacatgtgttaaaaaattataacgtgtttttgaaaaatgtttgtcttgcgcaaaaaaattttacaccaggtattttaaaacaagttcaacgtgtgtgaaaaagttcttttgtaaattaccctttcacttatacaaacatggttgtcatttttaatcctaaattttacacattaatttcaaatataggcgaaaatattta

SEQ ID NO: 6767 - DNA, 308 bp, Triticum aestivum
  Clone ID: LIB104-008-Q1-E1-F2
atctcgaagcatctcgggctcctcgcagaacaccttccccgacatcgatttcaccgaggagggcgggatctccggcgccgggcctagcagccccaagtcgctccggtgccttgcagagccgaaagtggtcaggaagatgagggtggtcgccgagaagactccgattcagcacgtccttcagccgccgaacatcgcctccttgctcgccatcatcatcggcatggtccccgtgctcaaggccttcgtgtttggggctgatgcgccgctctccctctttcacgacagtttggagaatctccctgctgctg

SEQ ID NO: 6768 - DNA, 297 bp, Triticum aestivum
  Clone ID: LIB104-008-Q1-E1-F3
ggtcgacgcggaggacgacgtggtgtcgccggtgaacaagtgaagccgacgtatccatcagcccatctcacgttcgggttcgtgtaatgcatgcatgcatgcacaaataattcgttcacgttcagggtctatgatctggactagtatttcacgtcgttgtttcgaaatatcccaatgattagtaaactccactacatctacattctattaccttttaattgcgcgattatagcccaaatgatgtttccacgagcacatatgatgctaattattcataaatacaatcctatttgcatg

SEQ ID NO: 6769 - DNA, 253 bp, Triticum aestivum
  Clone ID: LIB104-008-Q1-E1-F7
gacgggggatataacgaacacaatcgttcgctagcttctaccgttctataaccaactactcttgctccaatctggtatctgtctctatccggttccgtaagactgctggataccagatcccccactcccagcgagtatcctggtctcatctcacattcatctcgcctaagccgtcttctctccatccactactgacgattactgcgggacagcgtggcagcaactcattcgatgtcgtccggcgctcatcctc

SEQ ID NO: 6770 - DNA, 374 bp, Triticum aestivum
  Clone ID: LIB104-008-Q1-E1-G1
ggtcaaaaatatccgggtcgacggggttcttaagaacttaatactctagatgcatgctggatagcggttgatgtgtggagtaatagtagtagatgcagaatcgtttcggtttacttgtcgtagacacgatgcctatatacaagatcatgcctagatattctcataattatgcacttctctatcaattgctcaacagtaatttgttcacccaccataatacttatgctatcttgagagaagtcactagtgaaacctatggccccggggtctaatctccattatattaatctcccgtcaacaagctatttatgtcgccgtttattttgcaatctttactttcaatctatatcattaaaatacaaaaataattaacc

SEQ ID NO: 6771 - DNA, 298 bp, Triticum aestivum
  Clone ID: LIB104-008-Q1-E1-G12
cgcatctcatctaattcctggatatgtttgcgtctatggcgttctccatggaatcacgagtcgtaagcagcaagtaggaatctatcatcaaagggcttaacagagactgattttaccacaggtgtatagacgttattagtcagtggacagggtctactaagtggtattggatcatgcttgcataggtatcacattactctcaacatagacagcatatgtattgatactaaaatgcacaggaacagtacgtgttaccttaaccttgctgctgttattgaaatattggatgtagtaaaga

SEQ ID NO: 6772 - DNA, 331 bp, Triticum aestivum
  unsure at all n locations
  Clone ID: LIB104-008-Q1-E1-G2
cgacatagctcaagttcaccggcatgcccaactacctcggattcaaggtctaaacgcgcatgcatatgcatgcatgcaacgcctgccccctgtacatgagataccgatcgaggtanacgtaatgtgtgtacggaacgtgtgatgactgatgcttgcaagatcagcanaccttcgctgctccgttatcaccttctgttcttttctggagttctcttttccctggtaaatgattaagtgtatgttgtgagttgtgacattgattaactggaaaatgtatcaatcagatcccaataaactgcgtcggctttgcaaaaaaaaaacttccaaggga

SEQ ID NO: 6773 - DNA, 324 bp, Triticum aestivum
  Clone ID: LIB104-008-Q1-E1-G3
gggtcgacgggcctacctattatggcatttccatagtcattccgagatatattgtcatgcaactttccaccgttccgttattatgacacgcttcatcattgtcatattgcttgcatgatcatgtagttgacatcgtatttgtggcaaagccaccgttcataattcttcatacatgtcactcatgcatcattgcacatcccggtacaccgccggaggcattcacatagagtcatattctaagtattgagttgtaagtaaattaaagtgtgatgatcatcattattagagcattgttccagtgaggaaaggatgatggggactatg

SEQ ID NO: 6774 - DNA, 351 bp, Triticum aestivum
  unsure at all n locations
  Clone ID: LIB104-008-Q1-E1-G5
tacagtctagaattcccgggccgacggggatccggcagacggaggcgaacgaggaggcgaagctgagctcgttccagcaggagatcgtgcagctggcggcggtgctgaacggcgaccaccagctaagcagcctgcaggagaggatcagggagaggatgaacgtgagggaaggcacctcctacatgaggagcgccgtgcggcgcttcttcgaggccggcatgtcggccaagaggatgggcctcgccgacgacgagcagatcgtcaagatgaggccctcccttaccaccagaatgacctcctcccctgcagatcaagatgatagtccgtanagagcancgatgcatacataca

SEQ ID NO: 6775 - DNA, 338 bp, Triticum aestivum
  Clone ID: LIB104-008-Q1-E1-G6
ccgggtcgacgggaacatctaaattgtagcaatccaacctcaaacggtcgaatctctgtgcttaagtgtcatccctggatcggtaatgctgacacacacagtacttgaaggatttataacaaagtagcaatcacacacttattacatcaaatgtctcaaacgagaacttattacaataaatatggcttaagggcatctaaataagataacagcggaaggcttggaagataaagtgagtccatcaactccaacgccatagctgagtgcacgacaaacgacctagcgcaacctactcttcgtctgaaaagtctgcaacatgacatgttgttacccgaaaa

SEQ ID NO: 6776 - DNA, 275 bp, Triticum aestivum
  Clone ID: LIB104-008-Q1-E1-G8
ccgggccgacggggtccgtcaagaatggcggcgccatgaccgagaccagcagatgaattccagccggtcgatgccttacattgttcgtgatcggaattcagaggaggactctgttgctgagttgctgctgattacaattcagaagaggacactgttgctagctgttggcatcacagagccacaggcgtgcctgcactgtatatcgtcatcggctaggaataggatggccgggaaaatatctggtgataccggagctaaaatgctcccatgatacg

SEQ ID NO: 6777 - DNA, 265 bp, Triticum aestivum
  unsure at all n locations
  Clone ID: LIB104-008-Q1-E1-H1
gggtcgacgcgcaatggaagatgtangtgtgatatgtcaagtagtggacagataagccaaccactggatgtggttttgagggatttttgcagtggggtttgtagggtgctatgccgcgctgggtttgggatttgaaataaaacgaagggagatgtgccacgctcttaaaaaaaaaaaaaaaaaaaaaaaaaaaaaaaaaaaaaaaaaaaaaaaaaaaaaaaaaaaaagaaaaaaaaaaaaaaaaaaaaaaaaaaaaaagcggccg

SEQ ID NO: 6778 - DNA, 368 bp, Triticum aestivum
  Clone ID: LIB104-008-Q1-E1-H10
gacgggtatattacgcgacgtggaggtagtcgttgttgttgttgtaggagaggtgcgttaggtgcagcgggtggtggtggtggaagacgcgcgagcaattcattaaatctgttatcgagctttgtttcgaacgtcttctcaaggccagtgatcttctccatggcctcttcaaaattgttcagcacatcttgcacctgttcagtcatcatttgctgaaacttatcatgaagctccttgttcgataaattctcccagtcaatctcgtcggcttgtgatcctggcatggttagcagcaatagaaacacacaagaatatgattctacagactacgaacaagtggtggtggtgggtgtgatgaggacatgact

SEQ ID NO: 6779 - DNA, 315 bp, Triticum aestivum
  Clone ID: LIB104-008-Q1-E1-H12
gctaatcatagaaaacgcaccaaagagaaacacatatcatgtggtgaataaaaatataacctcaagtacagttaccgatggacgaagacgaacgaggggatgcctcccggggcatacccaagcttaggcttttcgatgtcctttaattttaccttggggtgccttgggcatctccaagcttaggctcttgccattccttattccataatccatcaaatctttacccaaaacttgaaaacttcacaacacaaaactcaacagaaaatctcatgagctccattaatataagaaaacaagccaccacttaaggtactg

SEQ ID NO: 6780 - DNA, 55 bp, Triticum aestivum
  Clone ID: LIB104-008-Q1-E1-H2
gggtcgacggcgaggagaatgatgaatgggctgatatgccgctttgtctcaacca

SEQ ID NO: 6781 - DNA, 314 bp, Triticum aestivum
  unsure at all n locations
  Clone ID: LIB104-008-Q1-E1-H3
gggtcgacgggtccgccaacggccagccgaatcgacggagaaggaatggcttcaaccaggggagacgtacgatgggagttcggccaatgcgaactgatacggaggatagtgtacggcgaactgtctatgtctcagacattgatcaacatgtcactgaacagaagcttgctgaggttttctcaaactgtggtcaagtggtacattgccgtatctgtggtgattcaaactcagtgatgcgtttttgcttttatcgagttcgccgatgatgtcngtgcaagagcagctctaacgcttggtggaacaattcttggttt

SEQ ID NO: 6782 - DNA, 295 bp, Triticum aestivum
  Clone ID: LIB104-008-Q1-E1-H4
cgggagtgcggaggccggccgggagtcacgtggcattcaaggtcttgaaggtagattccgcgtctgcacccggtttgcgggctcaacgcgcgcgcgaccggcttccgccgtgacagccaccatgtgcgcctcctccgcacgggcggagacgacaatgacacgctagttcctcctcgccagcgtgttggagcacgcgctcatcctcctcttcgtacgctgcgtgcatagacgcggctccaccagctgctcgcgtgcttggcagcgcggcggcatcgcgaggagggactgcagatga

SEQ ID NO: 6783 - DNA, 287 bp, Triticum aestivum
  Clone ID: LIB104-008-Q1-E1-H6
tcgacggggatgaatacaaatatagaaaaaaagttctgtaataatgttggaacaatgaaagtatttaatgattgtcttccttatgaatggtggactgagacgaacgatggtcttttcctaaaaatctatccccctagggggtatgcgcgtactactttgtttcaatgactaggagatttttggagttaagtatgtcagttctttatcactaatgtttagtccacggattatacgcactcacactcttccatcagtgctattctttcaagttccgggcaaggtaaaac

SEQ ID NO: 6784 - DNA, 311 bp, Triticum aestivum
  unsure at all n locations
  Clone ID: LIB104-008-Q1-E1-H7
cgaatcgacggagaatgaatggcttcaaccaggggagacgtangatgggagttcggccaatgcgaactgatacggaggatagtgtacggcgaactgtctatgtctcagacattgatcaacatgtcactgaacagaagcttgctgaggttttctcaaactgtggtcaagtggtagattgccgtatctgtggtgatccacactcagtgatgcgtttttgcttttatcgagttcgccgatgatgtcggtgcacgagcagctctaacgcttggttgaaaccattcatgggtttttaccctgtcaaaatttctgcc

SEQ ID NO: 6785 - DNA, 429 bp, Triticum aestivum
  Clone ID: LIB104-009-Q1-E1-A1
gtaccggtcaaccattcacgggccgacgggctaccagagagttagttacccatgggccgcaacatggcgcttcccctgctcctggcgctggcggccctagtggcgtcgctgccgtcgggttccgtcgcgacggcggggacggctggtgcgttcgacagctggttgtcggcgaaccagaaagacttcgcgatcaaccaggcgttgtacgcgaagaaggcggtgggtgacaccggcagcaccatcgacgagtccctgtccaaggcggaggataacaagaccacctacgtggtggaccccaagggcggtggtgactacaagaccatcacggccgcgatcgacgccatcccggagggcaacaccggtcgcgtaatcctggacctgaaacccggcgagtaccgtgagaagatcttcctcaaactcagcaagccc

SEQ ID NO: 6786 - DNA, 388 bp, Triticum aestivum
  Clone ID: LIB104-009-Q1-E1-A2
gaggggaggtaagcgagctgcgtccgccacgccgccaactcgctctccggcggctcgctcgtcccggcgtccttggccactcccttgcctctgctggtcttgggtgccatggcggctgcgggcagcaagggacagaagacatcgaagacacagcggcggtgagcaaaggcgaagacttacgaaggaaggagaatgggatggcggttccgagattggggaaggcacggagggtaaatgagcagcgtgcccgcggttattcctctttacggggaaggcgcgggccgcctcttttcccattaactgcgacatgacgcatgcgtgtgagaaccgccccacgcatgacccccacatcatgctcaaccctccacgtcgcgcgttcaacgcgggt

SEQ ID NO: 6787 - DNA, 386 bp, Triticum aestivum
  Clone ID: LIB104-009-Q1-E1-A3
aaccatattttaatctctcataataattacatgtaggaccataataaaattcaacaatgtagccatcatataaaatcttctcttcatgatccacatgcataaaagttttataatcttccaaaatagtgggattaacatcaaacccactttcataaaaagtttcataagattgaacactctccaaatatgtgggattacttttacctaaagttgacgctcttccaaccccactttcaatattaatgcaaacattattatcaatagcatattcatcatgaggcataaacaatttttcaagatcataagaaacgtgatcacttcaatcatgatcattgcaataagtagtggacatatcaaaattagcatccccaagcttggggttttgc

SEQ ID NO: 6788 - DNA, 388 bp, Triticum aestivum
  Clone ID: LIB104-009-Q1-E1-A7
gtcccgggccgacatgggcgacatgctgatgatggacaggttccgtcaatggcaggccacgcacaaccggtcgtacctgagcgcggaggagaggctgcgtcgcttccgggtgtaccgcgacaacgtggagtacatcgacgccaccaaccggcgcggcgacctcacctacgagctcggcgagaatgagttcgccgacctcacccaggaggagttcctagccaggtacgcgtcgtcctacgatggggtcggtgatgatactggcatcacgttgcctgtgggcggtggcgacgccgagctgtggtcgtccggcggcgacaatgatagctccttggaggctccgcctcccagctgggactggagatccaagggcgccgtcacaccggtcaag

SEQ ID NO: 6789 - DNA, 385 bp, Triticum aestivum
  Clone ID: LIB104-009-Q1-E1-B1
gggtcgagggggaccacaaggagaagaaggacaagaagaagaagaaggacaagaagcacggcgagggccacaaggacgacgaccaccacaacaccatcatcgcatcccattagcattctaccattttcctcggagagaagtagccagaaacagcagcgccatggccggcatcatgcacaagatcgaggagaagctccacatgggtggcggcagcgacgagcacaagaaggacgaggagcacaagaaggcggaggagcacaagaagaaggacggggagcacaagaaggacggcgagcacaaggagggcatgatggagaagatcaaggacaagatcagcggcgacggccacggcgacggcaagaaggacggcgaccacaaagagaag

SEQ ID NO: 6790 - DNA, 418 bp, Triticum aestivum
  unsure at all n locations
  Clone ID: LIB104-009-Q1-E1-B10
ggtcgacggcgaaggtgaaggaaacagcggagtcagccatggggagggggagggtggagctgaagcggatcgagaacaagatcaaccgccaggtcaccttcgccaagcgcatgaacggcctgctcaagaaggcctacgagctctccgtgctgtgcgacgccgaggtcgcgctcatcgtcttctccaaccgcggcaagctctacgagttctgcagcacccagagcatgacgaagacactcgacaagtatcaaaaatgcagttatgcaggacctgaaactactgtgcagaaccgagaaaatgagcaactgaaaaacagccgcaatgagtacctgaaactaaaggcacgggttgataatttacagcgaacacaaaggaatttgcttggtgaagatcttgattcattangcataaaagagct

SEQ ID NO: 6791 - DNA, 300 bp, Triticum aestivum
  Clone ID: LIB104-009-Q1-E1-B11
cggatctgcacagaggactctgatggttggtatagaaaattttctgactggggatcaaggataatgttgctactggagcagtttgtacaatttttgaccttctttactgaacattcgggaatagggatgccaccctggatgcatctctagatctgtggatgtatgtgtgtaatcatcactgtatttagggtttgaggcgctaatttagatgttcgttaccttgatgttcgatggagaacaaattactatttctgaaatggcggtcaatacacagagcccttcagtgttaacaaagaatac

SEQ ID NO: 6792 - DNA, 405 bp, Triticum aestivum
  Clone ID: LIB104-009-Q1-E1-B2
cgggtcgacgcgggccaccacaaggggacctggctaccattactactgcagttcccgcgtggttggaagatgtccaaggcggttaccaagaagatgcagaagctcaacgcctactgaccaaactcaccacttcgccggagggttttgatgggtttgtgctccaggacggcatcatccgccacaggggacgagtgtggctgggagcaaatgtggctttgcaaagacaggtccttgaagcgttgcacacaggcgctatcggtgggcactctggtttcaatgccacgtaccggcgtgtgcgacatctcttcacttggccgagcctgaaacatcacgtgaagttattcctcgaagcgcgccagacttgcaagcaagccaagccagaaaggattcgttacccgggattga

SEQ ID NO: 6793 - DNA, 401 bp, Triticum aestivum
  Clone ID: LIB104-009-Q1-E1-B3
gggtcgacgggtgagcctacaagatctatcttattattacggcactcgttaaatctatcttcgctttttatgcctagctaggggcgttaaacgatagtgctagttgggaggcaacccaaattttctttatgtttctagttttttttctcctgtttaggaataaatcttgcatctactctctatttagatgtgtttttatcttttaattagtgtttgtgccaagtagaacctataggataacctacgatgatagttgatttgattctgctgaaaaatagaaactttgcgcgcacgaatataattttgttaaatcacaggaacgtgcttttgagttgattcttttttctgctgttcaatagacaaattgtccatgacttcctattttggtagaagttttagag

SEQ ID NO: 6794 - DNA, 412 bp, Triticum aestivum
  Clone ID: LIB104-009-Q1-E1-B4
ccgggtcgacgcgaagtgacaggaaaatagctcaacagcatagccaaaaatatataatactcctatacatgcatatattcatagtgtgatataactacatgcataggaaacaataggtaaaggatgatcaacatgtaacttgccttggttctggttcataaagtcacactcctgacaatagctcgcgtcgtactccggaaaatctacacgtttcacacaattcaacaaatcaatcaccgaaacacgaatagaaccaaaacaaaaccaacagcaagaaaaccattttttaaactcaacaacagaatcttaacagcacctaaattgctctatggtcacaatgcaaaaggaatcactaaatttcgttaaacggttgggaagttacggcctcggaagatttgattaaaatccgaac

SEQ ID NO: 6795 - DNA, 422 bp, Triticum aestivum
  Clone ID: LIB104-009-Q1-E1-B7
cccgggtcgacggggaatttgaatttaattcaaaatttactgacaagatgaggagaattaagatacctctgcctccagttgatgagaaaaagaaggtagttgaagatgttgacaaggatcgaagatacgcaattgatgcatccattgttcgtattatgaagagccggaaagtcttgggtcaccagacactagtaatggagtgtgtggagcaacttggtcgcatgttcaagcccgacttcaaagcaataaagaagcgcattgaggatcttataaccagggattacctgtagagggacaaggagaaccagaacgtctaccgatacttggcttgatcatctgttctccatgctgggttcggtaacagtatgactaccaagctactgctatttaaggatgctatattttgtgccaaggcacaacgc

SEQ ID NO: 6796 - DNA, 413 bp, Triticum aestivum
  unsure at all n locations
  Clone ID: LIB104-009-Q1-E1-B9
gtcgacgggcaaggcggagcagggatggccggcggtcgatgaagatggccgggaccagacggatctgactggagatggtggccggcaggctggagctccttgcagcttccatggcatactcttgcgaagaatagagagggcgggagatactagagtgagaaagaaaagaggaaccaagggaggaaggggacaggaagagaagggaggcgaggccggcctgggggagctggtcgccggcacgacgtccggttgagggagaggcggcgggatcgacgcgcgggcgcagaagctcatgtgcgtgctcgcacacgagcgtgaggctctttcctcggttggttcctagaggcagcgcaaggacgaggtangggattgcgcgagggacttggcggcggggctgggctgaaactgctgct

SEQ ID NO: 6797 - DNA, 419 bp, Triticum aestivum
  Clone ID: LIB104-009-Q1-E1-C10
attcacgggtcgacggctacttgaaatctcatttatggtagtgtgcattaatttgtaagatttaacttgcaaatcatgacattgctcgcaaccttttggaatgtatttggatatcactgaatatcaattatttcttcataaattaattatttaaattcaagacttgcttgcgctataggatcccttcaacatggtacaagttgcatgatacctcgtgatctcattgtttatcagttcatttcctgttaattagttaaatatcttagttatcgctctaccttaacagtacgctgctacagcctacaaattgtgataatctgtttgttccacataatacacttacacttctgaatcatcgcttgttacaaatattttaaggcatgcgatctaattcttgattgttttgcagcttactaaaa

SEQ ID NO: 6798 - DNA, 306 bp, Triticum aestivum
  Clone ID: LIB104-009-Q1-E1-C12
ggtcgaaaattcacgggtcgacggcgggggtggcggcgccgaagacatgaacgacgatgattgatcgtagcagcctcatagcactcttcacttgaaacaagggcgtccttttgacccccgcaacaatagctctcttgtacataggcactctccggtccaggatagttgagtggtgatagtggtgttggtgtaaatgtttgctgtgggtaaaatgcgttcatctgatactatggtttacacatccctgttcttggccaaagaaagaaagaagacgacgatgaaatcgagcggtttcgcgtgtttttg

SEQ ID NO: 6799 - DNA, 393 bp, Triticum aestivum
  Clone ID: LIB104-009-Q1-E1-C2
gggtcgacgcggggcgacgatgtgaatgtggacgaggcggatagaaagctcttagatgatgaaaagaaacccgatatcacgaaacgaccacacgctcctattgaagatgaggtggaatgcaagaagccaaagatagcagaaggctcaaggtgccaaggagaagaacctgaggctggagggataaagaattcctcctgggtctgatgacaggggaatgcagtaaacaccagaagcatcaaaactatgatctggaacagtatcctgaataaactattttctggattatgaatgaattctgaagcatggggctataagtgaattatgtaacatggatttgtaactatggtggatgttaaagttaacgttctatcagtaaatcgtgaatgcgtgcgc

SEQ ID NO: 6800 - DNA, 413 bp, Triticum aestivum
  Clone ID: LIB104-009-Q1-E1-C4
ggattgtgaccttccggacagcccaggacagcaacggggtgcttaactcgtgggcgtcgaacctggagaagctgctggacctggtggagaagagctgccaccaaatacacaaggagacgatgatccacaaggcggtgctgaaagcctgaagtgaacaattttgaattgaatgtggccttgtttaggttgtgtgcgtagtagactttctctatggatctgaattcactttcactgtatgggtaaaactattctctctgctcaggtgggcatcgcctgtttgctttgggaactcgtgtgcgaaccggtctcgaaatactgtaaccacagggaatgacgaatgctatttgctgtatttttctgaacattatttgtattctttggcatcaactcttgctgaacctggatgtatctgc

SEQ ID NO: 6801 - DNA, 412 bp, Triticum aestivum
  Clone ID: LIB104-009-Q1-E1-C8
cgggggatgaaaaccccatttttggaagatatgatggcaaggaatcacacctttgttgacggaagagtgctgtctttgcaggatggagtagccatcgctctgagaatcctgaactctggtgattcacccgttaccataggatcctgtattggtgtgaacgagccaactgcctcactagtaactcagagttttgttaaggctatgtttgagcgagcaatgccccatttgcgttggtcatacacttcccagaacatggagaacatgaagcgcatgtttcacaaggtccatggcatgcccaactgctgtggtgttgtacatacaacgcgcatcagatttggatcacagaaccgtgagcatgtggagaatggaagcagtgtcatgcaagccggtccttgatccgggaaggggggtc

SEQ ID NO: 6802 - DNA, 394 bp, Triticum aestivum
  Clone ID: LIB104-009-Q1-E1-C9
cggcgtcggccaacgcttacgacttgatgacggtgcggggctgatagtagatggtgtaaggggccaaatatatggcccatttggccactcggcccgaagcatctcggcttccaatgatctcggcaagcggtgcattgcagacaacagtgattgggtgctcctgaaaagagtaaaatgcatccgtgggcatcgaacttgtgtcgaaagctcactttggtcattgtacttaagaatacgatcaatatggtcattatatacgacttggggtgattatacagtcactgcctcactgtatagctctgtattttgctctgttgactggtcaaacatcacaattcacaacaccctctctctatcctatgagggtcccacttgtcagttgacctctggcata

SEQ ID NO: 6803 - DNA, 410 bp, Triticum aestivum
  Clone ID: LIB104-009-Q1-E1-D1
gggtcgacgcgggagtggagttgagacttgttgagttttgatgtttggagtgggcttgacccttgatagatgtattgggttttgcttggttttctgtaattaactgggcaacaatcttcttaattaatagaactggtaaagcttttgcccgtgtttaaaaaaaaaaaaaaaaaaaaaaaaaaaaaaaaaaaaaaaaaaaaaaaaaaaaaaaaaaaaaaaaaaaaaaaaaaaaaaaaaaaaaaaaaaaaaaaaaaaaaaaaaaaaaaaaaaaaaaaaaaaaaaaaaaaaaaaaaaaaaaaaaaaaaaaaaaaaaaaaaaaaaaaaaaaaaaaaaaaaaaaaggcgccccccaaaaggatcaaaactttatagcggctaaacaaaaataaaaacccttctaaaagagccccc

SEQ ID NO: 6804 - DNA, 422 bp, Triticum aestivum
  Clone ID: LIB104-009-Q1-E1-D11
gtcaaaaatttccgggtcgacggcgagaaggaattggagatggaacggtcagctatggaatggatgatgctgatgacatatacatgcggtcatggactggcaccattattggtcctcacaatactgtccatgagggtcgcatctaccagctgaagctgttctgtgacaaggactaccccgagaaggcaccatctgttagatttcattcaagaatcaacatggcttgtgttaatcacgagaccggggcggttgacccgaagaagttcagtgtgctggcgaactggcagcgagagtacactatggaacatgtcttgacccagctgaagaaagatatggcggcgacgcagaaccgcaagctagtgcagcctccagaagggacattcttctagcggggtgttttcctgcccatctccagttccaac

SEQ ID NO: 6805 - DNA, 410 bp, Triticum aestivum
  Clone ID: LIB104-009-Q1-E1-D2
gggtcgacgggggaacccggacgaatgcaagttttgaaaacatgatgatgcaatgcaaatgatgacatgataagatgcaacacgcaagtagaatgacaaggcaacaacagcgaataactggaggacacctggcacatcggtctcggggcgttacattcaagtacaagttccagaaggccgttcttgccaacttctaaacccatagagttttcttttgaagcacccacctggagtctaggcaagaccatggcagcccacattaccatgggacgcattggagaggtctacaacagggagcttaaggacattatctaccaagtatgtgggcgccgagacgagcaatgggaagtaatcagcaccaggaaggatagatccattgtagctttcatccaggagttaaaccagcacat

SEQ ID NO: 6806 - DNA, 383 bp, Triticum aestivum
  unsure at all n locations
  Clone ID: LIB104-009-Q1-E1-D4
taagcacatagaaagctggtcatatgtacttctggggtgtagaagaattcacgtgtaatttacgctccgataccctgtttgtttaaatggtttgttgttatcacctgtagcattagtaatgtttgcatgttcatagatagacaactgtcaggtttatatganggacatcgtctttttaacttatatatgtgttggaatcattttgcttacatcaaagaaattttcagaattttaaattatgttaacacaataaaacaaattgttaaggtcaatataaaaaatgttgatggcattcaaaaaatgtttgtgacatttaaaatgtttaacacctattaaaaaaatggtcaaacacatatatttgcaaattgttagtcttgtatttt

SEQ ID NO: 6807 - DNA, 423 bp, Triticum aestivum
  Clone ID: LIB104-009-Q1-E1-D9
ggtcgacggccaggccaaccccacacccgagcccggtgagtatgtcgtctttgtatcccacctccgtcggggtttaggcttcccgacggatccttttgtgagagggatcatgttttactatgggttggaattccacgacttggctccggagtccatcctccatattttcgcgtttattgttgtctgcgaagccttcctccgtgtcaccccccacttcggcctgtggctgaagaccttcaatgtggagccgaagatgatcggggggtgtcaagcagagtgcggcggggcggccgtaagcaagagggctgatgcctcgtggcccgagggctccttccaagaggagctcggcttgtggttctatatcaccgctccgaagagcagcaggtagaagccgctgcctccattccgctcgggaactccacg

SEQ ID NO: 6808 - DNA, 409 bp, Triticum aestivum
  Clone ID: LIB104-009-Q1-E1-E1
gggtcgacgcggacaaaaatttctacatgtgtgaaatcagcaaagattttacaatagatgcaacttttaaaggaaacacttcacgttttctaaaccatagttgtgatcccaactgtaaactagaaaagtggcaagttgagggtgagacaagagttggtgtttttgcctctcgtttcattgaagttggagagcccttaacttatgactacaggtttgtgcattttggcgagaaggttaagtgccattgcggagcaaagagttgccaaggatacttgggcagccaactaaagaatccaacacagaacgctcttgcggctgcggcgcttgagaataagttgctcgtgcaacagggcggctgctctccttcaagggtcaaaacagagactcgcctgttaccctggaccaactg

SEQ ID NO: 6809 - DNA, 380 bp, Triticum aestivum
  Clone ID: LIB104-009-Q1-E1-E10
ggtcgacggggaccaggaacactcataagaaactacactacacgtaaacagttacaagaacctacatacatgttcgttccccacgctgatgttgctcttgtgtattgctgctgctgcccatcttttttctcatcccacagaggcacgcagtggctgttatgcatcttatcgccttggctatcgcaatcctgaattctgtaaaaaaaaaaaaaaaaaaaaaaaaaaaaaaagtaaaataaaaaaaaaaaaaaaaaaataaaagaaaaaaataaaaaagaataaaaaaaaaaaaataaaataaaatataaaattataattaatttaattaaaaattaaaattaaattataatgaattaaaaaaaaaaagggggcccccaaaa

SEQ ID NO: 6810 - DNA, 430 bp, Triticum aestivum
  Clone ID: LIB104-009-Q1-E1-E12
ggtctaaattcacgggtcgacgggagcgcttattgggaggcaacccaattttattattattctttctttttgttcctgtttagtaataaataatttatctagcctctattatggttgtgttttttgtgtttaactagtgtttgtgccaagtagaacctttgggaagacttgggggaagtcttgttgatcttgctgtaaaaaacagaaactttagcgctcacgagattagctacaactgtttactggagagttatatttagttgattatttttgaagatgattaatagataaatccctcacgtccagaaatttatttcagaattttttgagttccataagtagacgtttgatatagattactacagactgttctgtttttgacagattctgttttctatgtgttgtttgcttattttgatgaatctatgag

SEQ ID NO: 6811 - DNA, 399 bp, Triticum aestivum
  Clone ID: LIB104-009-Q1-E1-E2
cgacggggcctccgtcttcctcctctccgcctaccaagagttcagtgagtttggaacggatggaggaccagcagcaaagtctctgaagcccaagttcaacctgtttgtcaagcaggtgtccgccggcattgggatggcggtgccacacattgacatcaagtctgtcattgccttcaccatgtttcttaaagcctttggtggtctccttttcatcatcagcagctcgttcggagcgctcgtactgcttgtttacctggcattcataacccctgtcgtgtacgacttctacaactacgagatggaatcccagcaattcgccaagctcttcaccatgttttcacagaacctggccctcttcggcgcgctgctcctcttcctgggaatgaagaactccaaccc

SEQ ID NO: 6812 - DNA, 204 bp, Triticum aestivum
  Clone ID: LIB104-009-Q1-E1-E9
ctccagttatattaccattctcatcgggattaggtagaagatctgccagcccctctgttcatatcacgaatatgtatggctagataggatctccctgccgcaaacctcaatttagtttaaaactctcagtctcttcagtattaaagtgattcctgtactttagcgatggtacacattgcatagttaactttacccatttctctt

SEQ ID NO: 6813 - DNA, 277 bp, Triticum aestivum
  unsure at all n locations
  Clone ID: LIB104-009-Q1-E1-F10
gtcaaaaattaccgggtcgacggcgttcagataagaggaccctgtangttgttcttgtacatgcattcgccgtgtcagcagccaggcgacgcggaggggatgaagggcagagagagaacatgtttctgtctangtcatcctgcttacttangggaggtggagggcccgacagaaggcatgcaaatattgaagagggccgagactaatttgttaacggttatttttaaggtttattgtctgtttatttctattttatttcaactttctatacatacat

SEQ ID NO: 6814 - DNA, 401 bp, Triticum aestivum
  Clone ID: LIB104-009-Q1-E1-F2
gggtcgacgggtctgcaacattcaaatctgtatgtatcttgcaaatctctatgtctccctcctacacttgatgacagatggaattgaagcgtctcttgatgtgtttggttctcttgtgaaatctggattcctttgccaaggcaagtgcaccaatattgtcacaaaagattttcattggacccgatgcactaggtataacacctagatcggatatgaactccttcatccagactccttcatttgctgcttctaaagaagctatgtactccgcttcacacgttaatcccaccacgacgctctgcttggaactacaccaactgacagctccaccgttcaatataaatacatatccggattgtgacttagagtcatccggattagtgtcaaagcttgcatcgacg

SEQ ID NO: 6815 - DNA, 409 bp, Triticum aestivum
  Clone ID: LIB104-009-Q1-E1-F4
cgggtcgagccgatacgaccaaaaatattgcatacatgcatatttgtcaagtgatttctaatgcacactattcaataatctacttatgttatccagaacataaatacttcacacacttttgtgttttgtccaattgcacgtgtatgggacatttgtacaatccacatattaagataacggaaaatgacaagtttacgttgtgtccaaaaagtcctctcacgtcacttttgggccatgataagatatagtccaagtctctcacgttttggattcagattcggactgcatagacatacctgactcataacaccaacaactttttcataccgactccgaattgggtgattctttttttgttggaaactacatttcgtgctctttccaacccaatttgattcaccttcaaatt

SEQ ID NO: 6816 - DNA, 358 bp, Triticum aestivum
  Clone ID: LIB104-009-Q1-E1-G10
ggcagagacagcagcagaagcagagcaccccgaggatcccggtctgggcgtggtagctgctctccggcgaccaagccgaacgtatgattttcagcagcagttgatgaacaaaagctcgatgatgagttgggcagtctagatccagctgagggaagcttgggtcgccggttcgacgggacgaccaccgccagcagcaggcggcaaacctgctgcatcttatgctgtctctgaaccgcagggatgggttctcatccttttgatctccgaagatggagactaagagttaaattttgcgtgtgaattatcgctggttttttgttcttgtgtcgcgtaaggtgtaccatagcctgtcgatatg

SEQ ID NO: 6817 - DNA, 384 bp, Triticum aestivum
  Clone ID: LIB104-009-Q1-E1-G2
cgggtcgacccggggttttatcccgaagcaaaacggaaaggaaaaaaggaagagttaccgagagacagaggagccaggggaggggggtaaaatcaagaataaattataaccgcacggccaagaacaagggagggtaaataaatcgcccatcgcctcaccgcccgggaggggatgatgtccgaaagcgaggagcacgggtcgctcctggaaaagattggcgacaagatcggcgacaagatccatgagttcaagaaggattcatcgtcctcggactcggacgacgacaagaagaagccgcataaatccaagaagaagcacctgtttggcaggaagcatccgctccacaacgtccttggcgggggcaaagctgctgatcttgtgatg

SEQ ID NO: 6818 - DNA, 418 bp, Triticum aestivum
  Clone ID: LIB104-009-Q1-E1-G4
gggccgacgggctcctccattggacttctcgcattacatggtgtttgagaaacggatgaccgagacatagtctttcagaagcgctagcgccttacgaatgggtagaccgtaccaacctacatcccctacatctgctagtctaccactgtaagagttcgcacgacttagtcaactatgctagagcccatagtagcttgtggctgcacacggaagtttatagcatgaataatctcatgatccccttgagcctgggtggcggtccaaaagaaaacagacaatcgctggaatagctaggtgcctcaatccacccagatgtgtgtttaggttgccaccttaaataaaccattaattaacaatctcacaactgtcatggatacactcacccaatccacgtctactagcataacatggcataata

SEQ ID NO: 6819 - DNA, 340 bp, Triticum aestivum
  Clone ID: LIB104-009-Q1-E1-G5
acgggttaccctagaatgccacctccaagtacctttacaggaacatgatcacccagcaaatttcataggtaagtatcaacaaaattgtaactgcacatgtactgccaactgaatcaatacagacattaccaggctacgacgataacgatggtcgccgtagcctctgtgagccatggacggcaactcgagtcagctcattatctacgactgtggtacttctgcgcttggcgtcaacttctgggaagcggatccgagaccgtggaatactatgcccgggaagaggctccgtgtacgactactactgtggaccggctccattgcatcatacaaggtcgtcgat

SEQ ID NO: 6820 - DNA, 418 bp, Triticum aestivum
  Clone ID: LIB104-009-Q1-E1-G8
ccgggccgacgggcaacatgatatgtattttgcttggagcgtcattttattttgttagtatttgcttgattttatttataatagtgttttgtatctttagtttcaattaaaatgtcaaggatagcctttaccatgcttattttgctagtatacatgttgctgtttgaaaacagaaagtttaccgttgttgcaaaaattccctagaaaagtcagagaatggtataatgttgaatctttttcatattgagctctgataaatcttctacagcatagtatttttcttataatttttcgagttagggaagtatgatgaatcttgcattctttacagactatactgttttggcagattgctgttatgtttgcattgtttgcatatgtttgcttgtttaatgattctatttgaggataggagtat

SEQ ID NO: 6821 - DNA, 201 bp, Triticum aestivum
  Clone ID: LIB104-009-Q1-E1-H10
ggtcgacggcgaagacgaaagcacaaaggaagtcgccgggttctgggggtacctgctgcagattatctatcagacaaatgcaagagctgtgaagcctacagactgcatcatctgggtcaacaatttcccattcctcaccgtaaaagaatacagtatggattttctactgataagaatggactcggtcaaagctgttttcct

SEQ ID NO: 6822 - DNA, 413 bp, Triticum aestivum
  Clone ID: LIB104-009-Q1-E1-H12
ggtcgacggccatgcgatacttccaccttgggtacacacatgcgtacacacctacatcgagagaaaattatggacttgattgcggttaccacgccctaattaattgagcattaaaccaaacacgtctaaaacctctcttgtggtggaaatgcatgagaatgaagcgcaccctgtaaactatgacggagggaggagtagtatgaacgtgcaaaaccaagtacgcgtatggctagtcggtcaacgcacttcctcttggcatatcactgacatgtgggaccggagtgtgagcaaaccggtcacagttgacggctaaatggccaacccgccgttccttgagagagatgaggagcaagaacacacagacgggctcgcacggaggccaagatatattcgagcatggttgattgatatca

SEQ ID NO: 6823 - DNA, 229 bp, Triticum aestivum
  Clone ID: LIB104-009-Q1-E1-H2
gagttgagttgaatgggtaccttccggcgttgagagttttgtttcttacgctggtaccttgaacatcaagcgttgctgaatatgtgcctgcggttgctgttgtatgtaatgaccacacattacaagtatatgagatcgtgcaaagatgttgctgtttgggaccttcaaagttaatcgtttgtcgcaatgattcacgcttacgttcccctaattgtgacatcatagatct

SEQ ID NO: 6824 - DNA, 327 bp, Triticum aestivum
  Clone ID: LIB104-009-Q1-E1-H3
cttcctcacaacaatcagaatcatgatataacacgatggtatctcgctatgcctttctgataccgcagaacataaatgcagatcacctttaaaaatgaaggactgactagacattggtattcatggtgaaggagatccagacaagtcatactcagtgtaaactaacagcagtgaatgcacatgacagtggtgctctccaattggtgctttttaataagaggatgatgaatcaacatgaaactaactagatgggcccttcgcagagggaagcatgaatttgtacaggtgccatagctcgggtttgaaataagggtgaataatattttg

SEQ ID NO: 6825 - DNA, 252 bp, Triticum aestivum
  Clone ID: LIB104-009-Q1-E1-H4
ttgactaggagaacttaatgaacaaggagcttcatgataagtttcagcaaatgatgactgaacaggtgcaagatgggctgaacaattttgaagaggccatggagaagatcactggccttgagaagacgttcgaaacaaagctcgataacagatttaatgaactgcttgcgcgtcttccaacggctgcacctgccgcacctctgcaacaacaactactaataactccatggtcgcaaacaaacctccgctgaa

SEQ ID NO: 6826 - DNA, 369 bp, Triticum aestivum
  Clone ID: LIB104-009-Q1-E1-H6
cccgggtcgacggggatccaaagaggatggctgggaactgtgctgaactgaagatggctgaagatcgtcagggtttgcctgagtttgctccatataaataaataaaaatggcggtaataatcatttagaacgtctctattttgtgcgagcaaaattagtgaacttacgggacttgtcatggaattgctttgccttttgggaggcgactgaatatcagtatttgagataaggtaaaatggtgctgacatgatatgtatatatcgagattctagcttaatctatagtataaataaatgattagtgccatgtcaaaaaaaaaaaaaaaaaaaaaaaggtaaaaaaaaaattgaaaaataaaatttcaatagt

SEQ ID NO: 6827 - DNA, 406 bp, Triticum aestivum
  Clone ID: LIB104-010-Q1-E1-A10
agtcccgggtcgacgaatacgcagatatgatgtcactgtcaaaaacgtctactgggctgatagtggtgacctagttgcgatcgcaagtgatacatcattctacatcctgaagtacaatagagatgttgttgctgcctacttggaaggtggaaagcctgctgatgaggaaggcgctgaagatgcttttgagttgcttcatgaggtcaatgagcgagtgcgaactgggatttgggttggagactgttttatttacaacaactcatcatggcgcctaaattattgcgttggtggtgaggtcaccacaatgtatcacttggatcgccctatgtatttgatgggatatcttgcgaatcaaagtcgagtttgtcttattgacaaggagtttaatgtcattgggtatacatta

SEQ ID NO: 6828 - DNA, 393 bp, Triticum aestivum
  Clone ID: LIB104-010-Q1-E1-A11
gacgggatgagcaacacgaagtactgcttcgccatgagaacaacgagaagcgcccccatcaacgccagaaacacgacgtagacgatctccaggatgtagacgaaggcgagcgtgagcaggggggccttcagctgcgccttagctttcccgaggagctcgctgaaggtagcgcgctgctcgccggagtacgtcaagacggtggcgaagaggaggaggatccggacggcggagctgacgacgaccgcgaacagcaggtaccccgcgcttacgagcaggagctccttggtgtcatcctggatctcctgtacgagcttggcgtactccaggctgccggggtcggtgccgtttagcgccttgacgtcgagctggatctcgtcggcgaggggctggacg

SEQ ID NO: 6829 - DNA, 391 bp, Triticum aestivum
  Clone ID: LIB104-010-Q1-E1-A2
cgggccgacgggttacgaactgtaacgagagggctttcggtacatgcagctattaccgaaaacgattatcgacccttggtaccgagaaagcaacgacatcatatttacctttttatttttgtgtgtatctttgccactctcattttgtgtctgatatttcatgacttttaatgactcaattttcaaaatgacatgacttttcatgacttgtgttttgggctagattattacaaatctcaacttctaagaactataaagtaaaagaatgaatacaaagacccgtcgcaacacggagaagcatgtattcataaaccccgacccctctcggtgcatgtcaacatcgtagaccgtccgggcctccgtaagggcgcacggccggaaaaccccatct

SEQ ID NO: 6830 - DNA, 345 bp, Triticum aestivum
  Clone ID: LIB104-010-Q1-E1-A4
gatcactatggagaatctcattacgaagaaaaactagacaagatgcagcacaacgacgatgataatgtcgactgcggcgttggtctcggatgtgtacagaataattcctcgctatcaggtggtaataacgcaccggaacggacgctgttcttgatgcgcggaatggcaaggcaaagcattctttcaccgagcaatggtgattgacgacttgattacagacaagatagatttggcacattcttacctgtaaagataatttgccaaataaagccgtttataagctttgccactttgataatctcttgtactgacacaatttgaaagaattcctttgagatctaaaag

SEQ ID NO: 6831 - DNA, 374 bp, Triticum aestivum
  unsure at all n locations
  Clone ID: LIB104-010-Q1-E1-A5
cattcagtcctcatacgccacggcggcaggagtccgcacgcaacaacgaggcggtcgaggcacgcgcgagatcaagctcgctgcgagctagctgccacgtaganacaaccgttgaaccgcagcgtcgtcgagcgcccatcggagaccgtcatggacgacaccgatggccacgcgaccgctcgcaatccgcagctcaatctccacgcctgaactactagtacattccaacaccatgaagctcgatcacgtgcgcctcttcctgcaccgctgctactctctagtcactcatcaacccaatttgtcatcgtctcacacttatctataagtacggtatcgcataaactttgcacagacgcatactatttcggggttaa

SEQ ID NO: 6832 - DNA, 399 bp, Triticum aestivum
  Clone ID: LIB104-010-Q1-E1-A6
cccgggccgacgggaatagcattcgtgatcttcttgctcgcgtggtcgtggaggaaccaccagaaattccgcagaaagaatctctgatagtttggtgggaagagtgatttctactgaatcacttcaaagttactttttctatacataggctgtacatatatgatgtaactgaaaaacctcaggggagccaattccatgtggctcctgacagtgacacgaacctggtctgtcacagtagcccattgttgccagcttcataagattgacaattatagatcaatcaacaataatgcatcaaggcatgatgtattgttgccagcttcataagattgacaattatagatcaatcaacaataatgcatcaaggcatgatgtaacgagctaataaatcgagaattc

SEQ ID NO: 6833 - DNA, 370 bp, Triticum aestivum
  Clone ID: LIB104-010-Q1-E1-A7
gacgggtgatgcaagtatctaatgtatgttgtgactgtagatggagcttctgccgtggagacccttagggaggaacttgcccgagccaaggaacaagccaggagaagtgatgcggccgccctaaaggcggccgaagacttaagagccgaacaggctactcatggcaagagcaaagataaaatagccaagatggctgctgagctgaaagatgtcgccggccgatatgagcttcttgaaaaggaaagccaagtgagagcggctgacctgaagagagccatggaggcagacaaggaaacccgttctaaaatcagagcgggaggaggagctccgtcaagccagatatatcacggctgggaagccctttttgttg

SEQ ID NO: 6834 - DNA, 392 bp, Triticum aestivum
  Clone ID: LIB104-010-Q1-E1-B1
ggccgagaccctggaaagcctccaggaggtgcacctcagagtcaatagcgcagcagatgaaataaccaacttcatagtagaagatttgaaggccatcaagaagccgaagataatcgtggatcatgtcatcaccagctgaaatgtggcattctattggagcacttttcttactcatcatccatctttcccctctgtttgtcgagattaccgattttatttgcgccattcgtacttcaataaaaacaggatgctgccgcattcctgtacaccgcaagactcctattgtttttgcttttgaaattcgcgctgtatttcgttatgggcttgtaagttggtatcggaggagttgattttaacttgaaactgcaaatgttggtcaaagatgttttaat

SEQ ID NO: 6835 - DNA, 422 bp, Triticum aestivum
  Clone ID: LIB104-010-Q1-E1-B11
cccgggtcgacggggatggcaagagggcgtccggattcaatagcttgtctcagcctgagagaaggaacagcagcaagaagctccagcgccagctttccttgcactattaattttagttgcctaattcgtccatcatccatccatcattttgctgctgaagtgtattaattcttggttctgcttactagattccaccttatgcgctagctgttggcgcaagtacctcaaccacctcaaaatttagtagatttgtaatatcgttttcattagccattagtctctatgttgaaagagtctctgttgaagaaatagctagctaggcctacaacttttcctatgtctttttttggaagtatttgatgtcttgatgttttcttttggaagtatttgatgtcttgatgttggaaaaaaaaagaagaaaa

SEQ ID NO: 6836 - DNA, 399 bp, Triticum aestivum
  Clone ID: LIB104-010-Q1-E1-B2
gggccgacggggtccgtaatatgttataaagaccgaacaccttagggagtgttcggcatcgtgagtttggccctatatgcatcagctccgaatgaggtctttggtcaaatgttgggtttgcccggctcccacgttttggtaccttacgttctgttatatcggctaaggtagcactgggagaactactgcgattgtgccctggttcatccggatgagcacctcagtagagaaagccgaaaactgactatcgtgatatagcgagagactggttaaccactcgatgactcatcagaatttttgggattcctccgcattaatgaagggccgtttcccgatcatgaacgtatgtgccccatattcggacgagcgcagaagtaccaagggctatatagtagcccc

SEQ ID NO: 6837 - DNA, 374 bp, Triticum aestivum
  Clone ID: LIB104-010-Q1-E1-B3
cgggccgacgggctggctaggtcactcttcacattgcactgctcccagatccatatcgacatgcccacgctgtctgatgaggataaagatgttatgaaaaaatggggtgctccaaacaagattgacttcctctctctttcttatacaaggcacgcagaagatgtgcggcaagcacgggagttcctctctaagttaggtgatcttagccaaactctgatttttgccaaaattgagaatgtggagggcttgaaccattttgatgagatcctggaggaagcggatggtatcattctctcaagagggaaccttggaattgatcttccacctgaaaaggtgttcttatttcagaagtctgctctgcacaagtgcaacat

SEQ ID NO: 6838 - DNA, 395 bp, Triticum aestivum
  Clone ID: LIB104-010-Q1-E1-B5
ccgggccgacgggaagaacaaatctgaggctgcctcagagaagaaatccaaaaaaaagagcgagccctcccagccttccacaactgagaagaaacccaaagggaaaaacgaccatggtaccgagaagaagtccaaaggcaagaaggacgcctctggatacacaggtgcggagaagaaacgaaaagcaaaagtagattcgcccaagaaggctggggccaagaagaaaccagagatgctaaagaaggaagagcctaagaagaatgacaagcccaagtcgtcagcgccggccacaactgatgcttacgtcgcaccgaaggaagagacgaagaagccagaagctgccacgcccgatacctacaccgcaccaaaggtggaaccaaagaaggaagaaccaa

SEQ ID NO: 6839 - DNA, 390 bp, Triticum aestivum
  unsure at all n locations
  Clone ID: LIB104-010-Q1-E1-B8
cccgggccgacgggacgggaacacagaacgtggatcattgatcatctctgcgcgctcccaagacactaacgggtttggatatgtgaactgagtaggcctctggccttttcgcactaaccaccatgcgggaataagtatggacactcaaggtcgtacgattctccgaaagctcttttgacggcagtggttgagcggcgcgcgcccagttggacgggaactagctgctcttgtattagggggtgggtctgctccaggttgcgtacataatgtgcaggtgtgccaagggcgatgggcccaagacccctgagcgcttaggatgtagatcaacatgctggcctctctgttgagcctaggtangactacggcgtgttgatcagccgaggtcgggca

SEQ ID NO: 6840 - DNA, 376 bp, Triticum aestivum
  unsure at all n locations
  Clone ID: LIB104-010-Q1-E1-C1
gggccgaggggcaagatgaaggaggctgagctgatgcgaggaaacccactgatcaatatgaataactctggctccttcaatgtgaagagaaggtgggatgatgatgttgtattcaagaaccaagctcgtggagagactaagacaccgaaacggttcatcaacgacaccatcagaagtgatttccaccgcaagtttctgcataggtacatgaaatgatgctgctgtatgctttacagtatacatgctggaagaggagcctgtgatgtttctgaattctgaagatcaatttgtatgacataactgtaacatctatgttacctgtacggtgatatatttaccctgttcctaagagtaaagaanagaacccactgtttgc

SEQ ID NO: 6841 - DNA, 425 bp, Triticum aestivum
  unsure at all n locations
  Clone ID: LIB104-010-Q1-E1-C10
ccgggtcgacgggtacgttgatcgataaatacagtatactcattaaagaaatttaaaggatgacccggatgcagtacacttttgtgtatgagcgtcgcgaataggcccatcttgccgtcccggcacagagcaggctcgagcttgcttagaggagcaaattaccaacttcttctaccagcctgtcagaagtggtcgtcgcttagttcctatggcagctagtcatgagacgaacaggaagatacaacacgtaggaaatgagcaaacttttgctgggatgttcgtggccccatgtttggcagtcggtagctcagttcagacttcgctcggcccgaaatcatgcaccgacaggaactagttatgcggatagtattgctgaacatgaagctgacggcacctgcanagaatacaaatctatttaaaaacac

SEQ ID NO: 6842 - DNA, 429 bp, Triticum aestivum
  Clone ID: LIB104-010-Q1-E1-C11
cccgggtcgacggggatggtgaagatgcgactgagtatgctcataagaaaaattctaacgctatgacggatccaatgcattgcagtgtgccatatgtggaagactcgtggagcttacgttcacgatacaaagacatctaggcacttacaaatttgggaaagattacatcatggtcgacacatcagatcaaaagtcacagacccatatgtctcagagcacatctgctacatatggtggtccagatggggcatgttagatgtcttcaaacattaggaggaatggtggagatggagttacaatagtcggtagtaacagttcagacatcgcacgtggcaaagtcactcacaggatcgcacgtggtattgggataataggtcatgcactgactataacagtgaactgcgatggtaaagttctcatcatgcaaac

SEQ ID NO: 6843 - DNA, 418 bp, Triticum aestivum
  Clone ID: LIB104-010-Q1-E1-C2
gggccgaccggatccgtagttaattctcctcatgcttatagtcaaaataaagcttttaccaaacatatcattgatgccttgatgcaatcttatgatgaaaaacttaatttggaagtttctatacctagaaaacttaatgatgagtgggaacctactataaagattagaattaaagatcatgagtgttttgctttgtgtgatttgggtgctagtgtttccacgattccgaaaactttatgtgatattctaggtttccatgattttgatgattgctctttaaatttgcaccttgcggattttccaccattaaaaagccaattggaaggatcaatgatgttctcattgttgcaaatagaaatttggtgcccgtagattttatcgttcttgatatagattttaatccttcctgccccaataa

SEQ ID NO: 6844 - DNA, 351 bp, Triticum aestivum
  Clone ID: LIB104-010-Q1-E1-C3
ctgctacgcgggcgcgccccagcggcccttggcggcggctgccgcccccggcgacatgggatgccagctctcctgcgccaggacttcctgccaccgtctggatccaggtaatcagattggcacaattcatgtgcgccatgaattagtaatgcgcaaccactgcactcacgtctgatgagccgacaacgacgatgtggtggtaaattctttttgcagaccgcgaggccgctgaggcctgctccgggcagtgctatgacggctgcaagaccaagactctgccgaggcctctccgcgccggcgccggcatgcccaccacgttaggcccggtgctcgccgaccttccttcatccg

SEQ ID NO: 6845 - DNA, 413 bp, Triticum aestivum
  Clone ID: LIB104-010-Q1-E1-C9
gggtcgacggggtgtggtattactggcacgtctcatcaaagcagagatcatgtccctttatttacaggattttcattaatgcaggcgtagggaacctaaccgtcccctgggtacaactccttggtgataggtaagtttagagacccagggggaaacgcccggtattctgggcctttatatagagatcctagtctcgtcttcttcccttgcgctcgctccttcctcaaccccggccaccccaagttccaaccctcgggtcacaattgccaccagccttagtcatgtccggatccagccgtcagggccggtgggtggcttcttctgtcatggatgaggatattgcgaagctccgcatagcgaggtatctcaccccaaaaatctttcatcagcttccggcacaagggaaagtcata

SEQ ID NO: 6846 - DNA, 402 bp, Triticum aestivum
  Clone ID: LIB104-010-Q1-E1-D1
gggccgacggggagacaaggttgatagcattggccgactacctgctcccacaaagccacttcccttcacatcggaggaattagagtttactgccaagcgtgaagctgctaaagtgatcgctgcataggagggagtgcaaatcactgaagaagcccatccgaacttttattacttacataagtcctgcaccgggcatttataacaatcacctgctcttccctataggtgcattccttgtgggatccttgtgtttccttgtcatttgtgctacgcgggaatgacattgtcttcttctggtggcagtagtacctcctggtaagcaccagggctggcgggtaaaatatcctgtaactgtcttttgagagattagttcattgttttcgttaatagaaactttttccc

SEQ ID NO: 6847 - DNA, 268 bp, Triticum aestivum
  Clone ID: LIB104-010-Q1-E1-D5
acgggtcataaatagggactcaggtctcaagtgaggactatagactgggaagatgacgatgcatgacagttatctctgggaatagagaattgtactacttagtactttaccgatgcagcgttcgtttcttttttgtgggtagatctgatgtctcgacgtactgagacatagcgagtgtctggtggtgggtcattccattcttttgggttcgtagttgccatgtacatgttggttgatcgattccttaggtttttgcgtcctgcggtaa

SEQ ID NO: 6848 - DNA, 419 bp, Triticum aestivum
  Clone ID: LIB104-010-Q1-E1-D9
ttcccgggccgacggggcgaaagatggggaatatgccggtgcggatgaaggcggtggtgtacgcgctgtcgccgttccagcagcaggtgatgccgggcctgtggaaggacatcaccaccaagatccaccacaaggtctccgagaactggatctccgccacgctcctcatcacccccgtcgtcggcacctaccagtatgcgatgtggtacaaggagcaggagaagctgtcccacagatactaaaggtggagctttctccaatattgcagcagtgggaatttccatgttctataatccaccaaaagtgatttaacattttcagaatcacttctagttgtacccttttgctctttccgttgcatatgcaatgcagcaagtgtgacttgcaaacctattttgaggcctcaaatgttgagttgt

SEQ ID NO: 6849 - DNA, 413 bp, Triticum aestivum
  Clone ID: LIB104-010-Q1-E1-E1
gggccgacgggatggtaatacttcacacattattaatttcttgataataaagtatattaatgtaatgataatttgcataaaaattattcacgcatacttctattttaaaaatattcatgtaattaaaaaatagttcacttttttttaatgaaaaatgatcgtgcaattcaaaataatattcacatattttaaaaaaatcttcttgtaatttacaaagttgatcgtgtatttttttcaaattttcatgtcattttaaaatgtttacttataattccaaaatgttgacgtattttcaaaagtgctaatcattttttacaaaattatactatgttttgaacaattttcacacatcattttaaggtttatgtaactgaggaaacatgaaaattggttatttaatttaatacaacaat

SEQ ID NO: 6850 - DNA, 375 bp, Triticum aestivum
  unsure at all n locations
  Clone ID: LIB104-010-Q1-E1-E10
tcgacgggaaacccaagactgagtcttattagcagattactcacgatgcgaacgagttcatcatgtgagtcgtggcccttgcatctgactcaagatctgcgtcatgaggcgacagacagtctgaggcacatacatcacttcgttcacactgaattgagttcttgggactcgagctgtcttcaacagcttcatcagcacttacatgtattgctcggtctgctcacgttcaatgtatacgcagcatgcaacttctggggctgactgagaggcanatccctcacgtacatcagtttcaggtcacatagtttttgagtaccatcagatatccattcgatcacccatgctatcacatcttcagagtttccggtgatctgc

SEQ ID NO: 6851 - DNA, 395 bp, Triticum aestivum
  unsure at all n locations
  Clone ID: LIB104-010-Q1-E1-E11
tcacgggtgaatcaatgccttgaaatgtatctccggtgtgcagtccatgaaacacccaaacaatggcgcaagtggcttccaacagctaaattttggtatgacaccactcatcactcctccttgaatacttctccattcaaagctctctatggtcaagaaccaaacctcggtggcctgcccaccttatctctgaacctgccagacaacaaggatgcagacttggactgggcaacacacaatgacaggctacgtgctcaacttgcccaggcacaaaacagatgcaaacagaaggctgatcggaacaggacagagcattctttcaatgtcggtgatcaagttntgctcanattacagccctatgctcagtccatcgtggccaatcgcccctgccaaaa

SEQ ID NO: 6852 - DNA, 399 bp, Triticum aestivum
  Clone ID: LIB104-010-Q1-E1-E12
gtcccgggtcgacggggatttcaaaccgccacccaaggagcctgataggcccgtggatgacgatgagctcttaactatatccacagtgaagcggaaattagtgaacccgggggatggcaaacatgcagatggggaagttcgcaagagacaaaagattgaaacaaggattacttgtgccaagatttctgctttgactaatctggctagcaaacacaaggatacacttgcctcaagctcgccaagttgcgaggccaatggtgttttgggggagcatgctacacattctgatgagcatcaacattccacagacactgcagaaacctcacggcaagttggcggtgattgtatcaaagcaatgggcagtttgtctagtgagaaggctgtaaataccaccaaaac

SEQ ID NO: 6853 - DNA, 391 bp, Triticum aestivum
  Clone ID: LIB104-010-Q1-E1-E7
gggtcgacgggaagcatctcgctgtctgcgctgacggatgcgctgcggacgctggggtcgacctccgcggacgaggtgcagcgcatgatggcggagatcgacaccgatggtgacggcttcatcgacttcagcgagttcatctccttctgtaacgccaacccggggctcatgaaggacgtcgccaaggtcttctgaatcagttcatttcacctcagccgtccgatccaggagccgatccatctacgtacggcttcgtatatcaatttcatgcaactacctactccggtcccgatccagcctcagcttcacctgaggccggccctaattttgtttgatcaatttttttgctactagtagtaactagtgatgatcactgttgcaccatttattt

SEQ ID NO: 6854 - DNA, 393 bp, Triticum aestivum
  Clone ID: LIB104-010-Q1-E1-F1
atacccgggccgacggggaatggactatgaaaagtttattcaggcacacagagaaacagatgctgatattactgttgctgcgttgcccatggatgaggaacgtgcaactgcatttggccttatgaaaatcgatgaagaagggaggataattgaattcgcagagaaaccaaaaggagaacagttgaaagctatgatggttgatacgaccatacttggccttgatgatgcgagggcaaaggaaatgccttatattgctagcatgggtatctatgttattagcaaacatgtgatgcttcagcttctccgtgagcaatttcctggagctaatgactttggaagtgaggttattcctggtgcaactagcactggcatgagggtacaagcatacctata

SEQ ID NO: 6855 - DNA, 405 bp, Triticum aestivum
  Clone ID: LIB104-010-Q1-E1-F10
cgggccgatggggaaccgcaccatgagacgtccaataacgatgtgtgggtcaatgaacccaacatcatggatgttccttactctgcattccttaatcttcattctacatgtataatagcagacacaacaatatagttaggacatatatatagtgcaggcaatatgaacgagatggggtagaaattaataaatcacttacagaacgtagcaactgatgatagatttatcgagctcgcgcagattgaaaagctggaacaattcactcagttcaatttgtacatagtaatgtttgaagtgatgctcatgtccaacttccgcataaatatattctttggcgtttttattttttatgtaacccttgtaccatttcagcagacctttcatttgtggaggtagattcttttc

SEQ ID NO: 6856 - DNA, 407 bp, Triticum aestivum
  Clone ID: LIB104-010-Q1-E1-F9
cccgggtcgacggggaggttgaaaagctgactggcaagatagtgaagtggctgaagcccggtgggcatattttcatcagggagtcctgcttccaccagtctggggattccaagaggaaagtgaacccgacgcactaccgggagccaaggttttacaccaaggtgtttaaggaatgccactcctatgaccaagatgggaattcctttgagctttctctggtaacttccaagtgcattggagcttatgtgaagagcaagaagaaccagaaccagatatgttggctatgggagaaggtcaagtgcacagaagacaaaggctttcagagattcctggacaatgtgcagtacaaatccactggaatcctgcgttatgagcgcgtgtttggggagggttatgttagcaccggt

SEQ ID NO: 6857 - DNA, 404 bp, Triticum aestivum
  Clone ID: LIB104-010-Q1-E1-G1
ggtctagaatacccgggccgacggggggcgtatgtgcatttctattcttcatccacctggtgatgatcccaatggttacgagcttgcaagtgaacggtggacaccagtgcacacagttgagagtatagttttgagcattatttcgatgctctctagtccaaacgatgagtctccagcaaatattgaagcggctaaggactggagagaaaagagggccgagttcaagaaaaaggtgaggagccttgttcgcaaatctcaggaaatgctctgaaaaaggaggatcatatgggggagtccacaagcactgcaattctcttgctttcaccaaatggggcacctgatgccagcacttgcacttctcccctgtttattttccgttcagcgtcggtcgaatggtggggttg

SEQ ID NO: 6858 - DNA, 322 bp, Triticum aestivum
  Clone ID: LIB104-010-Q1-E1-G12
cccgggtcgacgggaggatggatgatgtgcgtactgtcgctcatcggaactatgtgcacgtatagtttatcattcatgatttagattgaaatcctacatgtcccattactcgagtgatgcctttccttaggacgaatggtgcacatggagacatgaaatttcgtgtatatgagattcaaatttctgtttcggacaggcatgggcagctttcctgaaacgattattacagtgcctgaagagtcagttatgagatcaacttatggattgcatacaacagatgacattatttacatgtattcttgcttttatgactagcaacggg

SEQ ID NO: 6859 - DNA, 382 bp, Triticum aestivum
  Clone ID: LIB104-010-Q1-E1-G2
gggccgaccgggaggccacggacgtgcagcaggcacggcggtgatcggcgtcagcatgcaaggtcgagtctgtggcggtggcgaccggcctttggtgcgccaggtcaggtccgcgagctgggtcacggtcgtggcgacgacatcgacatgagctactccggcgatggcgaggccgtggcttagggggcgtgtgttggaataagccacggcgtttattgttgtcggacccgacgggcgcgtcggatgcgcgcgggacgtgtgggtcgcactggtgtagtcgggctcgtcgggctcgtcggatgcgcgcgggatgtgcgggatggaccgccgtggcgagtgtgcatgctggtgaaaatgggcaccggttcgtggccgtgcccag

SEQ ID NO: 6860 - DNA, 374 bp, Triticum aestivum
  Clone ID: LIB104-010-Q1-E1-G4
gggccgacgggtcccggagtaatagtcgtactagcgcctgttacgccatggaatgcttctgttaattgggaatcaactggccagaaattaaaattcaggggggcgacggacctctagctaaggtgaaatagtatatcaggagaaaccttgtgcatcgcgagttactacgaacatctagtatcaagaagaagcggtcaagtagtgtcatctgtgggatgaataccatgcaagcagagacgtaagatttgcacgaataagggaagaggagtaccttcttcggttgtcggtgtggtcacctccacatgtcgcgccgatcttcttctttttatcggggaaaccgatgttctggatggtgcaagcttggacgaacccat

SEQ ID NO: 6861 - DNA, 299 bp, Triticum aestivum
  Clone ID: LIB104-010-Q1-E1-G6
tcccgggccgacgggaatctaaaactgatcactttgttgtgtacatatggatgcacattcgaatgtgcagcctattaaatgatgacatagcctcagtgatgctgcggacatctttgcaaacgtcacataatattaccagaaaatccatgatcagcccaatggagtactacaatctcttataaaccgcaaacattctgctttgctcgtcaatcagattaaaataagttcccaatgaccgtgggatgttctgaatgtggggtagaggtatatccactgctatcatctatctagccaacact

SEQ ID NO: 6862 - DNA, 419 bp, Triticum aestivum
  Clone ID: LIB104-010-Q1-E1-H10
cccgggtcgacggggagcatttgattttgctgatgaacagtaaaatcaaaagaaatagaaataataaacatttcgaaattttttggcacaaaagttgcacaggctttctaggtgtatgcaaaaactggtggcgatatgacatcataggagctcaggaaaaaaaaatagagtattgagaaaggttcatttttttgatttggagcactaattttgttttttctgtcccgagctcctcccatgtcacattgccatgaaactttgcacgcacacagaaaacttgttcatgtttgatgtatagaatttttagattttttgctgttttattttatttttagatatgatcgtgtctagctatggattttcactacaaaaccctagtggataagatttccctattgtatactctaggggcaatgccc

SEQ ID NO: 6863 - DNA, 369 bp, Triticum aestivum
  Clone ID: LIB104-010-Q1-E1-H2
gaccacagagcggcggcggcggcggcggcagcggaagaaagaggagagagctccagccatggtgcacgtcaacttctaccgcaactatggtaagacattcaagaaaccaaggcgtccttatgagaaggagcgtcttgatgcagaactaaagctggtcggtgaatatggactgaggtgcaagcgtgagctctggagggttcagtatgcactgagcaggattcgtaatgctgcaagacacttgctcacactggatgagaaaaatccccgccgtatctttgagggcgcggcccttctccgtcgcatgaaccgctatggtctccttgctgagggccaggataagcttgattacgtccttgccctgactgctga

SEQ ID NO: 6864 - DNA, 367 bp, Triticum aestivum
  Clone ID: LIB104-010-Q1-E1-H3
gggtcgacgggcaagaggtaatgacaaaaaaaaaaaaaaaaaaaaaaaaaaaaaaaaaaaaaaaaaaaaaaaaaaaaaaaaaaaaaaaaaaaaaaaaaaaattaaaaaaaaaaattaaaaaattaaaaaaaaaaataaaaaaaaaaaaaaaaacgggccgctcaaaaggttcaaagctaacttaaccttgaatgcaacttaaaatctcttcaaaagtgtcaccaaatttaatttaaggggccttcttttaaaaacttcataacgggaaaaaccctgggtttaccaaatttaacccctttaaaaaaaatccccttttcccaatttggcttaaaaccaaaaaggccctaacaatttgcctttccaaaaa

SEQ ID NO: 6865 - DNA, 341 bp, Triticum aestivum
  Clone ID: LIB104-010-Q1-E1-H6
gcccgacggtaaaccgaatgccgaggcggcggtagctcaacagagatgagagagctccatccatggtgcacgtcaacttcgaccgcacctatgggaacacattcaggataccaaggtttccctattacaaggaccgtcttgatgcagaactaaagctgggcagtgaatatggactgaggtgcacgcgtgagctctgcaaggttcagtatgcagtgagcatgactcgtagtgctgcatgacacttgctcatactggatcagaaaaatccccgccgtatctttgagggcgcgggccttctccgttcgcatgaaccgctatggtccccttgctgagggccagga

SEQ ID NO: 6866 - DNA, 372 bp, Triticum aestivum
  Clone ID: LIB104-010-Q1-E1-H8
gacgggatcgccaccgttggatttctcgcactacatggtgtttgagaaacggatgaccgagacacagtctttcagaagcgctagcacctttcgatggatagaccggtacacctactttcccctacatctgctagtctaccctgtaagagttcgcacgacttaatcaactataccagagcccataatggtttgtggctgcacacggaagtttctagtttgaaaaatctcatgatccctttgagcctgggtggcggtccaaaagaaaacaggcaagtcctggattacccaggtgcctagacaggcaatcctagaataaccaggtgcctcaaatccacccagatgtgtgtttaagttgccaccttaagtaaacca

SEQ ID NO: 6867 - DNA, 393 bp, Triticum aestivum
  Clone ID: LIB104-011-Q1-E1-A3
gttcgtaaagagggaagttcaggcgcgtgtataaacaaaaatacgtcacagaagttcaacgtgagaatagcatgaagttcaactactacgttgaatgaatttcagatgaaaaacttttaaaatctttgcgagtatgaaaaagatgatcaacacgggaaagttgcgtgtttacagcagctttcgatcggatagatcacttgctcaattccggtgagtggatgtacagctaggatcagtgaatagagatatacgagaaagcaatcgcatgtgatcaacacagtgaagttcatggtttcataccgaggagttcaggtacttcacgcgatgcatttttggcgaatcagttttgcgataaacgcataacgaatgatctcgccatttttaaaaatacgt

SEQ ID NO: 6868 - DNA, 395 bp, Triticum aestivum
  Clone ID: LIB104-011-Q1-E1-A5
ccgggccgacggggcacatggaagcatgttgtgatgttgctatatccagtgagagtaaatacgagtttgctcgctgtaaatttcaacagtagcaatttgaaccttgtcatgaatgtcactatgtcagcgttgagtttcatcactgggacggtagcaactactgacatttgggaatcgtagacttggaactagtgcaaatgataaattagatggtcccgcagactttctgaatgtcgagcacgtggaatattataaggtggaatgcctaaaaaaaaaaaaaaaaaaaaaaaaaaaaaaaaaaaaaaaaaaaaacaaaagaaaaaaaaaaacaaaaaaccaagacaaccaaagaatcaaaaaaaacagcacaaaaaaaaagcggcccccctaaaggt

SEQ ID NO: 6869 - DNA, 384 bp, Triticum aestivum
  Clone ID: LIB104-011-Q1-E1-A7
aatgcccgggtcgacgggaagtgggggacgcctgctccagtggaaaatggggtggccaacggaagggcgccagcatcatccgctacaagcaatctagccacaggtcaaaaccaaagatagatgcatgttgagttaattgtaaaatcttgtcatccgcatgttggtgtcagcaaggttattgttgcgtttcttgggaatgtaagattagctgtgtgtttatgttgtagttgtgagatgattacccttgctcctatgagtgatgatcttgtgatagggataaagttcataagaaggttcgccttaggttttgggcagtttaaacggaatagccggaccctgtaggtatcttgatgcataatgatgtaaatcagttcatggttttgt

SEQ ID NO: 6870 - DNA, 337 bp, Triticum aestivum
  Clone ID: LIB104-011-Q1-E1-A8
aattcccgggccgacgggaaatggaggacgcctgctccagtggaaaatggggtggccaacggaagggcgccagcatcatccgctacaagcaatctagccacaggtcaaaatcaaagatagatgcatgttgagttaattgtaaaatcttgtcatccgcatgttggtgtcagcaaagttattgttgcgtttcttgggaatgtcagattagctgtgtgtttatgttgtagttgtgagatgattacccttgctcctatgagtgatgatcttgtcatacggataaagttcagaagaacggtcgccctacgttttgggcagtttaaaccggataaccggaccc

SEQ ID NO: 6871 - DNA, 389 bp, Triticum aestivum
  Clone ID: LIB104-011-Q1-E1-A9
ccgggccgacatgggcgacatgctgatgatggacaggttccgccagtggcaggccacgcacaaccggacgtacctgagcacggaggagaggctgcgtcgcttccaggtgtaccgcgacaacgtggagtacatcgaggccaccaaccggcgcggcgacctcacctacgagctcggcgagaatgagttcgccgacctcacccaggaggagttcctggctaggtacgcgtcgtcctacgacgctgccggtgatgatacaggcattacgttgcctgtgggcggcggcgacgccgagctgtggtcgtccggcggcgacgatggtagctccttggaggctccgcctcccagctgggactggagatccaagggcgccgtcacaccggtcaagtccc

SEQ ID NO: 6872 - DNA, 414 bp, Triticum aestivum
  Clone ID: LIB104-011-Q1-E1-B1
cgggccgaccggcatgagtgggatgagtatggagaggagtagtatatatagtgacggtcttctgaaaggaggtgataaagccaagcttgaggaagcggtcaatcagttgatggcgatggcgatggtgacgtcgcttgctggtaagatacttgatgctccggctggagccgacagggtgcgtggagctggtgatcaaggagtcttgtgtgttgctgatgcctgacgctgtgctgtagtttttctgctcctttgaacgctgtggtccattggtctctatatagttctctctactgctttgaactctaatgttgtggttgcaggtggtagcaggttttggccccgtgggagtgcttcgatgccgatcactcagagcgtgttttggccaacttgctgcctctcttttccagtttgttg

SEQ ID NO: 6873 - DNA, 403 bp, Triticum aestivum
  Clone ID: LIB104-011-Q1-E1-B3
cgggtcgacgggggagccatacatgaagttcctgatggacgatggttcagatgagtcaattgacagcattctaacctgtgatgtacccaaggatgtggtcggcaacatgggcctttggacctttgatgacatgcccttgtctgctggtttctactgagggaatcgaggtcgctgggtgcctgtatatatagacaaaggaataagtattcaggacatcaacaagtgcttgtgtctggtgcctctagaattgagcagtagcgatgtcagtctatggttatgtctagcttaaatggtcaggtgactgaggtcttttgcaatagacctctgtcttgtgcccccagactatattatatctatatatgagaccagtatgtgatggggaactgcttattttgtattcatg

SEQ ID NO: 6874 - DNA, 432 bp, Triticum aestivum
  unsure at all n locations
  Clone ID: LIB104-011-Q1-E1-B4
cgggtcgacgggtttgccttaatatgccatggtcaactcgcatgaagattgcgctcggtgcagcaagggggcttgagtatctccatggagctgagagatccatcatctatagggatttcaagacatcaaacatcttgctagacgcggattataatgctaagctttcagactttggcctagcaagaactggacctagtggagaccaaacccatgtctcaactcgggtcatgggaacttatggctatgcagctcctgaatatgtgatgactggccatttgacagcacggagtgatgtttatgggtttggtgttgtacttctcgagatgattattgggaggagggctgtggacaagagccggccgagccgtgagcataaactagttgagtgggcacgcnccctccttgtccacaaccggaagctcttcagaatca

SEQ ID NO: 6875 - DNA, 367 bp, Triticum aestivum
  Clone ID: LIB104-011-Q1-E1-B5
gggccgacggggaacgccaggagttactgagcaggcatggatggatggatgtttggagcgcgagcatcaactgtggttgtgcataattatggttatgtcagacgtgttaattgtcgcaatttccaattggtggtactatatatatgtttgccaaataatgtgtgcaccgtgtgcaactatggaacagcgaagtggtaatcattttgtgagctttggaacagtgaagtgacacatatttgtcctaaaaaaaaaaaaaaatcaataaaaaaaaaaaacaaaaactagacggcctagacattcaaatcaaaacgaaacagagccatgagaattcataacacacactagcctggaaccaaaatacaaaacc

SEQ ID NO: 6876 - DNA, 408 bp, Triticum aestivum
  Clone ID: LIB104-011-Q1-E1-C1
gggccggccggggtgcctacagattcagctgtagatgagattgtgggttcaattcctcatttagctgcaggaaccaattcctcagaaggcttgcctgcctcatggcccataagtgggctggaaccaatgcttcgctgaagcaatttcacgggcccaggcgcaaaattagcacccccgggaagcccagccatgttgagacttctggcccagctgacctatgaaacgatttttaatgggttgcgtggattttcttataaatagtaccatcttgtttatatatcttaaatacaaaatcatctaagcgggacgaaactaagaatatcaccttgctttaatagtaggtatagatatagatatagatatgccattggcctttggttttgccccgtctcttggagaattagaact

SEQ ID NO: 6877 - DNA, 423 bp, Triticum aestivum
  Clone ID: LIB104-011-Q1-E1-C4
cgggtcgaccgggaggaggtgggatgggccgcctgctggctgggccggccagctggctgggctgcacagggaggagcccaggtaaggttctcccttttatttatttctgtttttgtaatttctgacatttgttttgatttaataaaatattaaatcatttatttaccttatgccaatttttgcaggagctagatatattattccagagctcctttataattggcataatatttggacatatattaatatatataactaatatatttccaatgcaaatatttatgcattaattccaaatgcccagaataaatacctatgagctcttaaaaatattggtttgatttttatctctgtccaatatttttagagagcaacatgagcattttcttggacccttttggagaaatttctatttgggtcatt

SEQ ID NO: 6878 - DNA, 432 bp, Triticum aestivum
  unsure at all n locations
  Clone ID: LIB104-011-Q1-E1-C5
ggtacctaggtcagaattcccgggccgacgggttcaggtcgcagtacctgcaggactacatcgaggcgaccctcgaatccagcaggaacgggtccaacgtgcagggctacttcgtgtggtcattcctggacatgttcgagtatatattcggctatcgcatgggttttggcctctatggtgtggacttcgactctgaggagaggacgaggtaccagaggcactccgccaagtggttcaccggcttcctccgtggcggcgacctcaggccggtggctctgcccggcaaggtctattcccagtgatcttcacacttcttcacacttccgtagcccacgaagaggaaaatgcactaataagcctggatggttaggtgttgtttttgggtggaaattgagctttgcttgggcagtanggtgtatangcctctgcttc

SEQ ID NO: 6879 - DNA, 415 bp, Triticum aestivum
  Clone ID: LIB104-011-Q1-E1-D1
gggccggccggctatattattaatcaccacatgatatgtgttttgcttggagcgtcttgtatgatttgagtctttgctttttagtttaccacaataatccttgctgtacacaccttttggagagacacacatgaatcggaatttattagaatactctatgtgcttcacttatatctttttgagctagataattttgctctagtgctttgcttatatctttttagagcacggtggtggttttattttatagaaattattgatctctcatgcttcacttatattattttgagagtcttataaaacagcatggtaattttctttggttataaaatttagtcctaatatgataggcatccaagagggatataataaaaactttcatataaagtgcattgaatagtatgagaagtttgat

SEQ ID NO: 6880 - DNA, 391 bp, Triticum aestivum
  Clone ID: LIB104-011-Q1-E1-D11
atgcccgggccgacgccgatctcgaaatcgggctaaggtacgactgggggaagttctacgcgtccaatacgttctatgatccggcaaagaagcggcgtgtgctgtgggggtgggtcggcgagaccgactctgagcgcgccgacgtcgccaagggatgggcctcgctccagtcggcccctcgcactgtggtgctggacaccaagacaggaagcaacctccttcagtggccggtggaggaggtggagacgctccggaccaactccactgaccttggcggcgtcaccattgaccgcggctccgtctttccactcagccttcatcgcgccacccagctagacgtcgaggccacattccgcctcgatccgctagacatcgccgtcgccaacgatgc

SEQ ID NO: 6881 - DNA, 419 bp, Triticum aestivum
  Clone ID: LIB104-011-Q1-E1-D2
cgggtcgacgggcacccgaggtgagcacgcctgctcctccccctcccctacctctgcctagctagggttcttcaaattttagttgcatcaaattagttagggttcatctatgggtggaaatgaatcggatacggatgcggctcagatgttttcttagatattgctcaaataggatatgtgcttgcccaagtggccggtcatgtttgcaggttacacctctgactggcctatgttttgccggagtgttgattcatttccgttccgacaaatttcaggcgctcgatatgtcctattttagcaaaggtcatgccggatttgttcgtgaattttggcatgacttgtgccagaatttgtaggaaatattgagtgccccggatttgtgtgttgagtatcctggtagttgtcttcgatcgattttc

SEQ ID NO: 6882 - DNA, 266 bp, Triticum aestivum
  Clone ID: LIB104-011-Q1-E1-D3
acactagcaacaactgatggttatacaccatgacgtctatgcgcacatatttgaaacagagcttgtcatatatatagcacaaagccattatgagtatatatagattattgtataaggttactctatagatgaagaactaattcatcagctctagctaagctgggtacagagctaattcatcagctcaccagtgatcatgcgtgttgctgaatatctcatctaagtgcgtgttgtgtaatgagattaatgtgggaatacatcatggg

SEQ ID NO: 6883 - DNA, 433 bp, Triticum aestivum
  unsure at all n locations
  Clone ID: LIB104-011-Q1-E1-D4
gggtcgacggggcagacgggcacgctggggtacatggcccccgaggtgctggaggggcggccgtacgaccacaagtgcgacgtgtacagctttggcgtcctgctgtgggagacgtactgctgcgccttggcctacccgaactacagcatcgcggacatctcgtaccatgtggtgaagctgggcatccggcccgacatcccgcggtgctgccccaagccgctgtcggagatcatgacgcgttgctgggatggcaacccggaccaccggccggagatggccgaggtggtggcgatgctggagaggatcgacnacaccaagggcaagagcatgacgcccgcccgtcccgaccacacctcgcanggctgcagctgcttcggcttctccaagtagtagtagtagtcgtcgtcgtgttgtgatgctggtcggtctgctg

SEQ ID NO: 6884 - DNA, 88 bp, Triticum aestivum
  Clone ID: LIB104-011-Q1-E1-D7
cgggccgacggggaatctaaaatcgggaccgacgtgcgtgtttttcgagcgaaggtttcaaggctcactttcctaaagtattgtactg

SEQ ID NO: 6885 - DNA, 405 bp, Triticum aestivum
  Clone ID: LIB104-011-Q1-E1-E12
aatgcccgggtcgacgggtcaaccaactgatgttgtaaaagcaaaagagggatgtttttgatatttgaaggatagaatctggaaacatatacagggctggatggaaaagtgtctatcggctggtgggagggaagttttgattaaatcagtcgcacagtctattccaacttattccatggcatgttttaagttgccccgtggactatgtgagcacatcaatgggctactacggaaattttggtggggtagcaagggaggtcagaggaagccggcgtgggtatcatggagaactatgtgcaaacctaaacatatgggaggcatggggttccgagatattgaactttttaaccttgctttactggcaaggcaagtatggagattgctccaagagccggataccctatg

SEQ ID NO: 6886 - DNA, 448 bp, Triticum aestivum
  unsure at all n locations
  Clone ID: LIB104-011-Q1-E1-E2
ggtcaagnaatccgggccgaccgggaagcggaacgaggtcaaggtttcggaggacggcaccgtccgcgccacagacttcaagaagattaccgctggaaaagatgacaagggtcttaagacttacgatcctggttatctcaacactgcccccgtgcgttcttccatctgctacatcgatggggatgagggaattcttcgctacaggggttatccaattgaggaggtggctgaaagcagttcatttgttgaggtcgcctacctcttaatgtacgggaatttgccaactcagagtcaactggcaggctgggaatttgcaatttcacagcactctgctgttcctcaaggactcttggatatcatacaatcaatgcctcacgatgcccaccccatgggtgtccttgccagtgcaatgagcacactttctgtcttccacccagatgcaaaccct

SEQ ID NO: 6887 - DNA, 356 bp, Triticum aestivum
  Clone ID: LIB104-011-Q1-E1-E3
gggtcgaccaatcaacttacagtattcaggcttccaagaccatcccttaggccccttaactctgacgataaatgaaccctgtggagagacaacaagccaaaatcaaacagattagggtccacaactgtttcaatgggaatgcagcgctcactattgaaatatcatacacatcacaaaattagctattactgttatatctagataactcataatgaagaaaacctacactaaaggcaagcatcacccacaagtataccttgtcatagactggaatgaaatagtagccattaggagcacattgggtgctttctttcaccaaaccatcaacagtacacagctcaacctgattcaaaaag

SEQ ID NO: 6888 - DNA, 343 bp, Triticum aestivum
  Clone ID: LIB104-011-Q1-E1-E4
gggtcgacggggatgagttccgacagcacgacggcatggtgacgatcttgatgttctaccgtcgcatggcttcgcctaatcaccgctacaatattatcaaggattatggtggaggggggcaccgcacacagctaaaagatcaatgatcaaatgttgtgtgtctggggtgccccctgcccccgtatatagaggaatcgaggatggggccggccaacgaaggtggcactcccaacggggggaatccacatctaaaccttgtcatacactagaatgaaatagtacccattaggagcacattgggtgctttctttcaacaatccatcaacagtacacagctcaacct

SEQ ID NO: 6889 - DNA, 411 bp, Triticum aestivum
  Clone ID: LIB104-011-Q1-E1-E9
gggtcgacgggactcatgaacactcttgcaaggttgagtatcaagttgaggaatgcagcgcggaaaaccgagccaacaatgagtgcatccatactaagactaccagagcggtcttgccgcgtggaggagatatcgtgtacagtgttgcacaccagcactctggaggagtcggtgcttctctgcatggccaggatggacgccttctatgtgaatcgcttccaacttacggcacagggaaggaggcagggaacgaggcaaactacattgtcggcatgtcgagttgctaccctaagccaggatccatcaaggtcagcgacggcgaggtgctgaccatcgtctccaactacagcagcgaccgagagcacaccggcgtcatgggcctggtctacatcctcgtgggcgaaccgcaac

SEQ ID NO: 6890 - DNA, 382 bp, Triticum aestivum
  Clone ID: LIB104-011-Q1-E1-F11
cgggtcgacgggacacgtcatctgaaaagtctgcaacatgaacgttgcagcccgaaaacgggtcagcacatggaatatgctagcaatgtaacacatagagagtaatgaacagaaatatgctatactacatgcatatatgactagtggaaagctctatggttacagttttgcataaagccaatttttccctactgcaaaggaataaatttaatttaactatcatggtggttgttaaacattgagaaggtagacaccctctcaatcccaattgagcatcatcattaaacccaacagattaaattaaagtaacatgatgagattcacatgataatccagatactagatactcaaaacatccataaccggggacacggctaaccat

SEQ ID NO: 6891 - DNA, 269 bp, Triticum aestivum
  Clone ID: LIB104-011-Q1-E1-F12
cgggacgacacgagtcatcattgtcacattgctttgcatggtcatgtagttgacatcgtatttgtggcaaagccaccatgcattattttttatacgtgtcactcttgattcaatgcaccatcccggtacaccgctggaggcattcgtatagagtcatatcctggtccaagtttcgagttgtaatccctaagttgtgatcacaataagtgtgatgatcatcactattagagcattgcgcacaaaaggcgcacaaaaaagaaaggggccac

SEQ ID NO: 6892 - DNA, 383 bp, Triticum aestivum
  Clone ID: LIB104-011-Q1-E1-F3
gggtcgaccgggatgacaagcaatcataacacaatacactacatgtaaacagttacagaaacctacatagatgttcattcccaacgctgatgatgctcgtgtatagtgctgcaggagtgcatcgttattcgcatctcagagatgaacacagtgggtgtaatacatcttatttgtttggcagtcgcaatcgctcgttctatatctgaatggccgtgctatcctatcttcgaaggttcataaatgttgaacaatagggcgcatgcccaatggaattgcgataggtgtccccctgccaatgacaatgaagacacccgacgatgtctccaacaagaacgatgcccataaagccatggctgtcctcaaggtgctcgtcaacaaagtta

SEQ ID NO: 6893 - DNA, 417 bp, Triticum aestivum
  Clone ID: LIB104-011-Q1-E1-G10
ccgggccgaccgcgacggaaacctcacctacggcggctactccagcatggtggtggtgcacgagcgcttcgtggtccggttcccggacgccatgccgctggacaagggcgcgcccctgctgtgcgccggcatcaccgtgtacacccccatgaagtaccacgggctgaacgctcccgggatgcacctcggcgtgctgggcctgggcgggctcggtcacgtcgccgtcaagttcggcaaggccttcgggatgaaggtgacggtgatcagctcatcgccggggaagaagcaggaggccctcgagaggctaggcgccgacggcttcgttgtcagcaagaacgccgacgagatgaaggctgcgatgagcaccatggatggcatcataaacacggtgtctgcaaacatccccatgggccctct

SEQ ID NO: 6894 - DNA, 423 bp, Triticum aestivum
  unsure at all n locations
  Clone ID: LIB104-011-Q1-E1-G12
cgggtcgacggnnanncgcacggctgggctggctgggccggcccagtcggaggaaggtttttttttataaaacattttttacacacaaccaaaaatagaataaaccatacaagataaaaataaaataggcatattatatatcaaaattttcagaaaaagatttcctacaacctaaacatatttatagcatcaaatgaaatccaaaaaattcaaataaagcaaagagtgctatagctctaataaaatcaaataaaaatcattttaaaaaataccaaaatgatttcaaatttatttctctccaattttctaatgtagtgaatcattttaccctattttccatatattttatttttggtgaaaaataatttgaataaaacccaaataactccaaattgaaaataatttaaaagggacattaaattt

SEQ ID NO: 6895 - DNA, 434 bp, Triticum aestivum
  Clone ID: LIB104-011-Q1-E1-G2
gggtcgaccggcctcttccttacacccagctcgtatgccgggcgaaagcccaaatccatgccggattgagcgacagcggcgctccgggcgtcgtcaccttcttgggggtgtcgttcttggtgagcttggggtggatgtgatgctttggttgcttggcggcggattggtcttcagaagccctgccggtctcggcggagcggtgcttcatcctactcatggatggcggcgtatctcggcggcgtggcgcagtggagattcggcgtccgatgtgtggcgatggactcgcgcaggacgacgaagctgtctggtgtcgtggtgacgtcgatagctgagtggccagacaaggtacaagcctcaatttgatctgaagacggacctgtggaagatggcggcgacgacacacgagtgcgtctgaccggattatgccccagacc

SEQ ID NO: 6896 - DNA, 407 bp, Triticum aestivum
  Clone ID: LIB104-011-Q1-E1-G9
gggccgacgggttagactaaatgtttgaatgcaatagcaatgcaaagatgagctatttgttgaaatatggctgccagccggctaggccgacatatatgaatcgacgcgttgggcgccctgccgattcaaatctaaaacatgagccggatcgctcgagtgatttttcgaagaggaaaagcgccggatcgctcgccacggtgagcaaaggatggacgcgaaatgaatagagctggcttcaggcacacggcgtttctgcatggatgcatgttccccatgccgggccggctccccaccatgcgggcatgggctggtgcaagtctgatacgtgcccaggcagtctgccagcgcgtgtgagttgtgaccatcctcacttatcgaattaagatttttctgaccctaaaaaaaga

SEQ ID NO: 6897 - DNA, 426 bp, Triticum aestivum
  Clone ID: LIB104-011-Q1-E1-H10
cgggcaacaacgagcggcgagagtggagaactggatttgggggaagtggccgtggggaaggacgaaccccgtggttaagtcagaagtagcagtagcgcgttacagaaagcgcgctactgctacattagctacagcgcgttctgggatacacgctactgctactactttctcttttccccctttatcatttagttttcttcacattttatttttttcctttcaccttaatatatttctttcattttcaattacctttctatttgctttccatttaattttatatcctttagcagtagcgagtttagattaaaacgcgctgctacaaagaaagtagcggtagcgtggttcgatataggtcgctactactatgtgtagcctatcggataagctgtgggaattttagtagtaacgtgtttagaacaagac

SEQ ID NO: 6898 - DNA, 381 bp, Triticum aestivum
  Clone ID: LIB104-011-Q1-E1-H11
atgcccgggccgacggggaaatcaataaactcgctcagcattataaggtcaagctgggagaagactgataggttcctgacgttcaagctcctccctcgtagactgactgcagtcaccagtgcaagcagattcttgttctgcccagggcatccccactcacagatgtgatggtgtgatagtgataatccattggctagttctcatcttgtggtgtgatgatggtaataaagcattgatttgtttggtgccgccatgccctagttgtggccagctgcaaagcagcagttccttagtgtaacaacagtcgatacattacgaccgtttgatggtacgcttggtgtattaataatctttgtatgacctccaaaataaatacaaata

SEQ ID NO: 6899 - DNA, 346 bp, Triticum aestivum
  unsure at all n locations
  Clone ID: LIB104-011-Q1-E1-H2
accgggcccaacaaggggaaaagggggaaacgatgcgggtgctcacagcgcgtccgatggcgtcgtcggcgaggtcggcggcggtcgggttgctgcgaatcgacgacgacggctgtcggtgcagaggacgaaggcaacaacgatgacggcactgcggggcgctccggcgtcgtttgtctcagcaaagatgaagggcaggtcatggcggagctcctggaccgctcgagaggacgagggggaggcgatagccgcggtggtgctcgtcggtagcgtcggcgcggtctggtgaggtggggaacagccagggagagagagccagggaaggggaaagagctccanggaagag

SEQ ID NO: 6900 - DNA, 233 bp, Triticum aestivum
  Clone ID: LIB104-011-Q1-E1-H3
gggtcggccggaggccatacagcagctcgaggcgatggggttcaaccgtgagcttgtgttggaggtcatctttgcatgcaacagggatgaagaactggctgccaaccatcctttggatcatggccacgagtttgaggaacaccaatagatgttagattggtgttaccgtcgacagacacaagagtcagtgacacaagcagtacagtacggtgtcgttcttatatctcgctgct

SEQ ID NO: 6901 - DNA, 417 bp, Triticum aestivum
  Clone ID: LIB104-011-Q1-E1-H4
attcccgggccgacgggggtctgagacatggtgacagagtcacacacacaatttatgtgataacttgggcacataagtccaggaaaatttccactgatgagtgcaaagaaagaaccgctaggatgcgtgctaaaaaagattgctttgtgaaagcgtgttcttctagttttcatgataataatgatgaagatctaaaagtgattgatgtggctcctattaaacctttgttttccaatatgaatcttgataaatatgggactggcgattagtcaactttagttaaaaggcgtccaatgattcggagtttttagatcttgatgcaaaaattaataaaagtgggattgaagaggtcaaaactttacatagcaatgaacccactattttggatttcaaggaatttaattatgataattgctc

SEQ ID NO: 6902 - DNA, 420 bp, Triticum aestivum
  Clone ID: LIB104-011-Q1-E1-H8
cgggggtctggacatggtgacagagtcacacacacaatttatatgatatcttgggaagatcagttctgccatagtgcccttgctgctgctgctacttttagcctttgtttccttgggaacatgttcagagtgtagataagaaacttatgctactatagatggatatatggcattcggtacatcgacagcaagaagacggatattctttttctgtaaaacatgaccctttgattgatttgggttcactactaaactttctaatgcttcctcatacgactaccacctctgattaatctcctttggattcagttatgtacttttgtttgtttccaactatttttcactcgggtttttgtgggtgttggtagctggaatgcagagcatgaagtggtgtaaggtggtgttgatgtgggacattgc

SEQ ID NO: 6903 - DNA, 277 bp, Triticum aestivum
  Clone ID: LIB104-012-Q1-E1-A1
gaccgaaatgattagtgccagtgtttgaatttgttctgtttgtcatggtacgaggaaagatcacgaaatagataatgtctttacacacattttgtctgtatctaatcattatccgtatttcactcctaccaactggtagattcatgtttttccctcatttgtctgcccattgtttcagaataattcacattgacaacaattacaataaagcagccactctagacgattctagcattcgatatcttgaaagcaaattcatagcgcttctatattctca

SEQ ID NO: 6904 - DNA, 419 bp, Triticum aestivum
  Clone ID: LIB104-012-Q1-E1-A10
cgggtccgacgggaaggcaaaggaagaaagggcaagctctacggacctttgtaattcggtcaacacaatggtgtcattccggtggtggataattgggttcaactgggtggtaaccggcggcaaaatgctcgaaaaaggtgctccaaaactctattggttaactgtcgtttttctcgtgtttgatgtcttcttcgctgttttttgtgttgttgtggcctgcttcattggaattgcactgtgctgctgcttgccttgtgtcgttgcaatactgtatgctctggttggccaggagggtgcatcagatgcagatattggcattctccccagatataaatattctgatcccagtgagaatggagaaaatggaacggacgatggggttatgattcctatccttaataatagtggaacatctacaa

SEQ ID NO: 6905 - DNA, 388 bp, Triticum aestivum
  Clone ID: LIB104-012-Q1-E1-A12
gggttgtactaaaaaaaaattgcaaaacttcaggcccaataatcctgggaaaacctttcctaaaaacaattggggcaattattgaaatgaaagaaggaaacattagatttcaattccccccaaggaaaggcatggaacactttccaagaaataaaattaagttaccatatgaatctatcatgagggctacttatggattaaataccaaagatgacaatacctagatctttgtattatgcctagctaggggcataaaacaatagtgcttgttgggaggcaacccaattttattttgtgttttttgtttttgcttctgtttttcaataattacacagtataaattctatagtaattatgtgttagtgttttaattactgtttgtgccaag

SEQ ID NO: 6906 - DNA, 417 bp, Triticum aestivum
  Clone ID: LIB104-012-Q1-E1-A2
ccgggtcgacgggtcccaacaccactcaataccttcgggggaaaccctagatcagctgatcggatgttggcggcaatcatatgtcgtaacccccttgggggcggcattcttggaggtgcactcggcttcgcgggaccagcggacggcttctttggtggagtggtgcttcatccatacattgatggcgacggatcttgacggcgtggcgtagtgcagattcggagttcgatgtgggaggatggactcgtgcaggaggacgacgctgtctggcgtcgtggtggcgtcaatggcagagagacctgacacggtagacgcaacagtacagctctgaagatggactcgtggcaggtagctgcggcggcctcatacccggcaggcatcctgattgaggagtgcgcccgactggtaggtgcccca

SEQ ID NO: 6907 - DNA, 339 bp, Triticum aestivum
  Clone ID: LIB104-012-Q1-E1-A3
acaggagtacgaacgcaatgttcaggcaccacccagcaaacctcaggttcatcgctgacctcaatcctttctccttcccggtttcggcacgggaatcatgcaagtaccaccaggatcggacggtccacctatggcatgtctttcaggattggcacgtccactatggcatgttcatgacgtctcataacgacttcgtctgatacatctacagctgttataaatctgaatgtgagtctcattcataacgaccacactttcaggtcttctcatccagtcaataccacacataccagcaacaggcttctcaatacttgacatcatatcatcgggacgctccac

SEQ ID NO: 6908 - DNA, 397 bp, Triticum aestivum
  Clone ID: LIB104-012-Q1-E1-A4
cccgggtcgacgggttggattagcacgggattgttggccttcagaggcaaatcatgacagaccaagatgagggccttgagaagctggaagagaccgtgctgagcacaacacatattgcgttagcagtcactgatgaacttgacctgcacgcaagactgactgatgacctacatgatcatgtggatggtacaaactcgcgccttcagcgtgtgcaacagaggcttgcggttctgaacaagcgcgccaagggcggctgctcctgcatgtccctgctgctgtccaccgtcggtataatgatgcttgtggttagtgtctggctcctcatcaagtatctgtaacctctgcccaactcaaatcagtttcaagtgtgcagttcattcaaagacagtatggttac

SEQ ID NO: 6909 - DNA, 432 bp, Triticum aestivum
  Clone ID: LIB104-012-Q1-E1-A6
attcgcgggtcgacgggggccatacagcgttgtgctttttgatgagattgagaaggcacatccggatgtgttcaacatgatgctccagatcctggaagacggaaggttaaccgacagcaaggggagaacagtggacttcaagaacacgctcctgataatgacatcaaatgttgggagcagcgtgattgagaacggggggaggaagatcgggttcgacctcgactcggacgagaaggacagcagctatggcaggatcaagagcttggtgatcgaggagatgaagcagtacttccgaccagagtttctcaaccgtctggacgagatgatcgtcttcagacagctgaccaagctggaagtcaaagagatcgcggacataatgctgcaggaggttttcaccatgctcaagaccaacgacatcaacctgcatgtgac

SEQ ID NO: 6910 - DNA, 406 bp, Triticum aestivum
  Clone ID: LIB104-012-Q1-E1-A9
ggggccaagggaaggaacaaactgaaaggaccaatggattaagaatttggttttggaattgcctcaaggtgatcctcaaattctccgaattaatttcaaataaactactaaaataatttgggaaaatgcaaccgggaacctgggaattgggcatagaaggtcagttctgatgccagataatgtccacttgaaagagatgattattaggtgcgcgcaagtgcaattgtgcaatgatagtgtcaattcgttatttgttcaaagtgacatgaaaacgaatatcctacaactgagttggatcttcactccaacacaacatctttttttgtggaagaaatggtgacaacttcactgcatatgacatgagtgtaatatatattaaatctcatgtttcatatgttccaaaatc

SEQ ID NO: 6911 - DNA, 424 bp, Triticum aestivum
  unsure at all n locations
  Clone ID: LIB104-012-Q1-E1-B10
gggaatttgataaatcaaatccatggtttaataacgaaccgtgttaacttaccataacaatacctcaattccaatcgaattccaaaattggaattccaataggatacaacatacacagggtgtacgcattacatatgaatgaaacatattcattaacctaagcatgccctcaattttcattaatgagttgatattatattaattgaatatcctttatgttttacgagatttttgctaaagtttcatttacacctaattaacatcgaatagaccctgttactgtgagaattcttaattcaagagttatacggagggacttatgtcaccacanacagaaactaaagcatgtgttggatttaaagctggtgttaaagattataaattgacttactacaccccagagtatgaaactaaggatactgat

SEQ ID NO: 6912 - DNA, 432 bp, Triticum aestivum
  Clone ID: LIB104-012-Q1-E1-B2
cccgggtcgacgggggccccgagcaaggcggttgagcggttcgtgcagaccaggctccgctcctcaggtaatgtgctcagctaggatgaactggccgccgagaacgtctacatcaatataatggtccaagtagaactggagaagctcgcactcaagggtcccagcactggtcagcaagctccgtccagtccaagcgccgcagcgggcgacctgaatactgtatgcgccgcttcgaccgcgtcggcatccgcagcaggcacgtcgaccgacaagaataagaactatgccgtgctggctggcaccctgtctggtctgaacgccctgagctggtacctcctgtcaaagcctaataatacggaggaggttgtcgactgatcggtccatcctgcactggatttttacttccttactgcacatggacctgcgcgatga

SEQ ID NO: 6913 - DNA, 411 bp, Triticum aestivum
  Clone ID: LIB104-012-Q1-E1-B4
ccgggtcgacgggcgccgggaccaaggacaacggcggcgcctgcgggtacaaggaggtggacaaggcccccttccacggcatgacctcctgcggcaacatccccatcttcaaggacagccgcggctgcggctcctgcttcgagctcaagtgcaccaagcccgacgcctgctccggcgagcccaccatggtcaccatcaccgacaagaacgaggagcccatcgccccctaccacttcgacctctccggccacgccttcggctccatggccaagaagggcgaggagcagaagctgcgcgacgccggcgatgtggagatcaagttccggcgcgtcaagtgcaagtacccgccgggcaccaaggtcaacttccacgtggagaagtcctccaacgaaaactacctggccctggtga

SEQ ID NO: 6914 - DNA, 390 bp, Triticum aestivum
  Clone ID: LIB104-012-Q1-E1-B5
gacgggcttcatgaatttgatgcatgttgattgtagtttttaaagcctagtattgaacattgtagatgagttcgtcgtatgattcttccgaaaaagaatttgatatggaagaggaggaggatcttgcgatgatcctagctatgcacatcaataaaaaaccgaagcacggtggttcggttattggtcggcaaaaaaattggagggataggatcgatgcccataatagattgatgaggtactattttgtggagaatcccacatacccggagtcgtactttcgtcgccggtttaggatgagcaccgagttgttcaggcgcattgcagagaaactagcgagccatgaccggtttttttcagcaaaggaagaacgcctccagagagctcgggcat

SEQ ID NO: 6915 - DNA, 374 bp, Triticum aestivum
  unsure at all n locations
  Clone ID: LIB104-012-Q1-E1-B9
ggcaacaacccctggaacggtaatttggaaaatcctttcctcaaggaaaaattaaccgggctaacaaatccccctttcgtgcctcctttggggtgttggtgttgcaacggtgactgattgcaactcaatgctgtggggtcatactgtccttgttggcaaatatcacgacttgcatcgcgcaaatcatgacanacactattcagaagaaattcaaggtttcttcaacccagctgctatatcagtcctgtccttaccaatcattgacactgtntcttatcggcccgttccttgatggattcctgactaaccaaaacgtcttcgctttcaattacacatctaacgttgtgtttttcaacgtcctgtcctgtttgaaa

SEQ ID NO: 6916 - DNA, 393 bp, Triticum aestivum
  Clone ID: LIB104-012-Q1-E1-C1
accatctgcatcaagcattgagggccaacaaactcaagaattcaaaacagggacattgaaaaaaggtggcaacattggctacagttcaggatacaccgggccttcgtgagggaattcttttttacccccccttttttgactttctcgtcgatgcaatttgtaaagtccggttgaatttatatgctgacttgacttgtgtgcgaagaaaggatgtttgacccaagtatagcttctggtagctgcagccgttgattctttcatatgttgttgaccgatctgcccaccgccgtttgctatgtaattcaaagagctaattgagtgctgtactgttcatacccactcagggttgagtaagagtaacccaacgattctttttaccaaataagatgcata

SEQ ID NO: 6917 - DNA, 433 bp, Triticum aestivum
  unsure at all n locations
  Clone ID: LIB104-012-Q1-E1-C10
acggtcgtacaatccgggtcgacggggcatgacactaatatcacaaccttcatatctcaaaacattcatcagttaccaaacttccaatataattcatggcacccaataggaaagtttttattatacccaacttggatgccaatcatattaggacaagtttcataaccaaagaaaactaccaggcggttctaaagactctcaaaatgatataatgaagcatgagagttcatctatttctataaaataaaacgaccgccgtgctctaaaaggataaaagtgaagcactagagcaagtgacaaactactccgaaagatataagtgaagatcaatgagtagtcataattatgcaactatgtgaagactctctaacatttagtaatttcagatcntggtattttcttcaaacatcaagcanaactatgtaaaatgaca

SEQ ID NO: 6918 - DNA, 352 bp, Triticum aestivum
  Clone ID: LIB104-012-Q1-E1-C11
acctgctgaccggcggcgggcccacgcggaaggaaaataagggaagggcccacaaccgctcggttaggcaaggcaaggcaaggcgcaagcgtatgcgcgttccctttttcggacggttgtacagcgggcaagggaaaagccaggaaaaaagagagcggtggctcgttttggcacggcccgggtcggtcgcatcgctttcttccgcggcatgggcgggcagcggcagcgatcggtccgtccatcaatgcagtcggccttgtgcggtggtgcgttgaagggtgaggttgctaggaaatggaaatggtgctcgctggctggcccttgtcgcgttgcctgcttttgcgtccggttt

SEQ ID NO: 6919 - DNA, 394 bp, Triticum aestivum
  Clone ID: LIB104-012-Q1-E1-C12
ggggccaccggaactattgaccagggaacggcaaaggccaaaatggcacccgggttcaagccaaaggacctggcccctaacacaagcaccaaggagaattggttcaacggtgtgaactaaccgcggcatcttcttcagaggagccaaagaagctccagtctctttccgtaatcgcctctagaccatggcagaagtgcaataacaccgcgacccgggcgacctttcagccggtgtcgcccttgcccttgtctcattctgatgcaataaggcccgaagaaatttgaagagtttgtttgtacctttgaatattatagagcatgcaccgagcagtcgtgatgtttgaatcaaaccgtcgccttcaagcgcttgattttgatggatgctgtttgttttc

SEQ ID NO: 6920 - DNA, 430 bp, Triticum aestivum
  Clone ID: LIB104-012-Q1-E1-C3
ccggtcgaccggataatcaaggtaacggatggcaatgttcccaagagtggccctgtcaaagacgaggagcaaattgcttccctgaggctaaaaagataaagtcaactattaaggaccacggttaaggataaggattccgttcctgcttgtgatgttcaaaaacctgcacatgcatctgaaaacattggcaccaatgattcacaaaacttgcaatatccttcaccctaatggacctactgggttgacctgatgagaacataagatgccaatggcaatactctaaattttggtgtcgagtacgagcgtcaaaaatggcacccagaggacgagctctggatctgcttaaggtgttacgcagttcaataagtactttaactgtgctgtgcagcttcttttcagaaacctgggactgcaacttgggtgcagttgc

SEQ ID NO: 6921 - DNA, 383 bp, Triticum aestivum
  Clone ID: LIB104-012-Q1-E1-C4
ggcgatgttcccaagagtggtcctgtcgaagacgacgagcatattgcttctctgaggcctaaaagatcaaagagactactgaggagcacgggtgaggataaggaatccgttgctgcttgtgatgttgagaaacctgcagatgcagctgaaaacaatgacaacaatgatgcagaagagttgcaatatccttcagcctagtggacctactgggttgacctgatgagaacataagatgcgaatggcaagactccaatttttggtgtcgaataagagcgtcaaagatggcacccagaggaggagctctggatctgcctaaagtgttacgcagttcaataagtactttaactgtgctgtgcaacttcttttcagaaacctgggactgc

SEQ ID NO: 6922 - DNA, 423 bp, Triticum aestivum
  unsure at all n locations
  Clone ID: LIB104-012-Q1-E1-C6
aattcgcgggccgacggggaacgtgctcaccatcttcgaggaggaaggcgggcggccggacgccatcatgatcctgacggtgaagcgcgacaacatctgcagcttcatctcggagaccaaccccgggcacgtgcggtcgtgggagaccaaggacagccagctgacgatggtggcggacgacctgaagccgcgggcggtgctgacgtgcccggagaagaagttgatccagcaggtggtgttcgccagctacgggaacccgctggggatctgcggcaactacacggtgggcaaatgccacacgcccaaggccaaggagattgtggagaaggcgtgcgtggggaagaggagctgcgtgctggccgtgtcgcacgaggtgtacggcggggacctcaactgcccgnggcacacggccacgctggccgt

SEQ ID NO: 6923 - DNA, 393 bp, Triticum aestivum
  Clone ID: LIB104-012-Q1-E1-C7
attgccgggccgacggggatgtatactggccgactggcaagattaacttatttaactatcaacatcttagcaaaaatacccgatacaaacgccatggtgctaacaccatgtgaaagagaattgaagacatataaattccttttctaagaaggggcgacctagccagccgccaggacgacggctccccttcaccggcgacctcagtcatcggcggaggggggtcaccggatccacgcatgtggatcatgtagctttaggtcttaggtagcttactttttcggtcgttcatcgtcttggcttgggcagcggcactaacgccgttgaatagataagatccccagctatcggtcctatggttgaatatccccgctatcggtccgattgaattgaaat

SEQ ID NO: 6924 - DNA, 418 bp, Triticum aestivum
  Clone ID: LIB104-012-Q1-E1-C8
gacgggggtaggcggcagcgatacgcggcggctcggtgcacgcgcgtgcaaaacgtgcgctctgggcgcgcccagagcgtgcacgccaactgttcggcaaaatgccaatgcgtgccacagggcttgggtgaggctggcaattagcagacctaggttaggagtagctaggatcttagtggacaaggttactgggtcagtggattaagtacacagtgcaaactaagaatcatgtcaaaactgactatgcacaccaagtgttcgacagaatgtcatgggcatctaggcaactcttggggtggccaaactctccagatcatattctctttagatgataaagagggtggcaaggttacttggtcaagaccagaaactcgttagtgcaaaaatttgagaaaaccaattttgggcagaaactaaa

SEQ ID NO: 6925 - DNA, 194 bp, Triticum aestivum
  Clone ID: LIB104-012-Q1-E1-C9
ttatacttgcgctgtccgatctgctccgggaggacagtgagtcttggctcgacaaggtcgccgttctatacaagtcatccacgggatgggaacgctgcatagattgcctgtgcatgcgcatgcactggcacgttcctgcgtgtacaagatagtgtgtgagccgagccgcgctttgttgcccgtactgtttgtca

SEQ ID NO: 6926 - DNA, 441 bp, Triticum aestivum
  Clone ID: LIB104-012-Q1-E1-D1
cggtcaagatatcccgggtcgacgggcttgatcaagagctacgccttccatcgctactcttacacctcccccgtgcaaataagcagccgccgccgagtctgccttgccaatactctctggagatgcaaagcctcccatgggcgattatccgaagcgtcagcagagtcggctctgctgcgcctcgctggtggcttccagctcttgcccgacgagatgcccctccactcatggagtcagtaccgtcttatccaaatcaacatctctataaaattttccgtgagaagcatagcaagctggatttgccgtgcctctccttctgttctgctactacacgaggcatggataaagcagagaggatgaaggcagcagaggagagcaatcccatggtagagacaagtgcaatacaagatgtgtattaccagccaatcatcccgggtagca

SEQ ID NO: 6927 - DNA, 416 bp, Triticum aestivum
  Clone ID: LIB104-012-Q1-E1-D11
cgggtcgaccgtctagtacgaaatctagggctgtttatgacacttataggaataccccaacaaattgattggaaagaataacttgaggtggttcgtaccctaccataatctcttcatttgttctccgctattatttactttggagtgactctttgttgcatgttgagggatagttatgtgatccaattatgttattattgttgagaggacttgcactagtgaaattatgaaccctaggccttgtttcaatgcattgcaatatcgtttacgctcacttttatcattagttaccttactgtttttatattttctgattacaaaaacatttatctaccatccatataccacttgtatcaccatctcttcgccgaactagtgcacctatacaatttaccattgtaatggatgttttgggg

SEQ ID NO: 6928 - DNA, 410 bp, Triticum aestivum
  Clone ID: LIB104-012-Q1-E1-D12
cggggccgacggttaaccccaatcaaaatggaggaattaccaaggttgtggattcacatcaacaccagcagcaaagttgagtgtataaatcggaaccctaacgtatcacttactcgtcgtaagataatcctgcatcatgagacattgcatccacatatggtccgtacattgaaagtactggcaaattcacaccatatagaatgatgaataaaggctatcactacatgcatatttggctggtggaaaagctctatggttataaggtttttgcgaaaagccaatttttccctactacaaaggaataaattttatttaactaacatggtggttgttaaacattgagaatggttgacagcattcccaatcccaattaactaacatcattaaacccaacaacttaaattaaagta

SEQ ID NO: 6929 - DNA, 429 bp, Triticum aestivum
  Clone ID: LIB104-012-Q1-E1-D2
ccgggtcgacgggaggatccaaatcctagggttaatcaattttagctagttgatgggaaaatacgaattaatggtaatggtcttagggcgatttagttcggggaaaggggaaggggaagaaaattctatgaacctttccttttttttcgttaagttcaagtctgacgagagtaatattctacgactaacaactcatttattttgagaccgacccacttcctatctaggattttatttactagtcctttatattccaacgtgtcaatcgccaaatgctttggcaatttccccgggtccgatgaagcaatataattttgaaccagaccttttgatctttggttatctttcgtagtaataatatctctgggtttgcaacgaaaacttggtatattgactatacgaccattaactaaaatatgtctatggttg

SEQ ID NO: 6930 - DNA, 437 bp, Triticum aestivum
  unsure at all n locations
  Clone ID: LIB104-012-Q1-E1-D3
ggtcaagatatcccgggtcgacggngattctaaggagctccaaggacgggatgcccaccatcatttctccagaccagtacaagaagaggttcaggaaggccatgtcaaagtacttcctaactgtccccgaccaatggtcaccttgaatcgtcgtcacttgatgcctactattatttgcctattcgagtgcaagatggggtgatggcgactgggaagcggtacattgttttctttctatttttttctttggttttgttagaatagtcgatcgatctgcgccttttgtatgttatttttgctcgcatcaggctggactgggatcgctggagagggcgtacggtaaatgttgcccccatccaggcagagcctatggatcgatatgtgtatattatatataacaatgctacactgtaacatgaaatgaaatgcagacgaat

SEQ ID NO: 6931 - DNA, 416 bp, Triticum aestivum
  Clone ID: LIB104-012-Q1-E1-D6
gaccagctcctgcagcatactgacgccagcgagaatgtcgtcgtcgccagcgaaggacttcaggaacgccggctcgtcgcgatggctgacgccgcgagtgcgcttgtgagagccctcacgtgcctgtgagagctcgttcgagggctccgcgtcgcaccgggacatctgtgctgtggctgcggcttcgcggcgggacctccctagtgcttccgccgccttggtctttcctgcctggttatatgtccaccctaaactcctcctaccggtcatggcggaacgacttgacagagaataccagtttggtgggtgatgaggagaggaactgtgaagtaattttcgagtgggtagtttttatagcccggtgctaagtgtgaacacatattagtttgataggtgtgaacagatttgcaattata

SEQ ID NO: 6932 - DNA, 441 bp, Triticum aestivum
  Clone ID: LIB104-012-Q1-E1-D7
taccgatctacaattcccgggccgacggggacgatcatgttgtccttgacatgacttctatgtgcaagggtatgatatacgtgaacggtgaaggcatgggtcgctactggacgtcattcataactcctggcaaagtcgcttcccaggcagtgtaccatattccacggccatttttgaaatccaagaacaacctattggttgtatttgaggaggagcttggcaagccggaaggcatactcatccagacagtgaggagagatgacatctgcgtgtttatctcggagcacaaccctgcgcagataaagccatgggacgagcatggaggccagatcaagctcatagccgaagaccacaacactcggggattcttgaactgccccccgaagaagaccatccaggaggtagtctttgccagcttcggcaacccggtggggtcatgcg

SEQ ID NO: 6933 - DNA, 389 bp, Triticum aestivum
  Clone ID: LIB104-012-Q1-E1-D8
cgacgggaaggacgccctcaagttcgaggaggtctacatcgccgtcctctgcgtctacaatgacatcaacaagtacttgccagggccgcactacgaccccccgtccaaggagaggctcaaggaactcatgagagagtttgacatcgacatgaacggtctcctggaccgcgaggagttcgcggagttcatccggaagctgaccgccgagtcactctgcgcgatcagcctcaagctgatcatcacgctggtcgccgcccctgcgctggcgctggcgaccaaaagggcaaccgagggcgtccccggcgtcggcaatgtagtgcacaaggtgcccaatgccatctacgccgccgccatcaccatggctgccgtgctcatccagagatccgccg

SEQ ID NO: 6934 - DNA, 365 bp, Triticum aestivum
  Clone ID: LIB104-012-Q1-E1-E1
acgggaacgccaggaattactgagcaggcatggatggatggatgtttggagcgcgagcatcaactgtggttgtgcataattatggttatgtcagacgtgttaattgtcgcaatttccaattggtggtactatatatatgtttgccaaataatgtgtgcaccgtgtgcaactatggaacagcgaagtggtaatcattttgtgagctttggaacagtgaagtgacacaaaaaaaaaaaaaaaaaaaaaaaaaaaaaaaaaaaaaaaaaaaaaaaaaaaaaaaacaaacacaaaaaaaaaaaaaaaaaaaaataaaacacaataaaaagaaaaaaccacaacaaaagaacacaaaaacagacccccac

SEQ ID NO: 6935 - DNA, 312 bp, Triticum aestivum
  Clone ID: LIB104-012-Q1-E1-E10
cgggtcgaccggagaaacaaaacgcgtcggaagccgctgcaaggctttcacacgacgagaagcaacctaccactaggagtgcatcatatttacaagcgtcacagcacattgcaaatcctggccttaccacaaagccacatcattttgatcgcccagattccgacgaattccgtatggctccacttgcgcccatgtctacgtccacgcagacgccattaacaggatctgaaccatctatagagtgccggatgacttaattaccttttgaggctaacccgaccttgagcgactcaattcatgtgttgacaatgt

SEQ ID NO: 6936 - DNA, 343 bp, Triticum aestivum
  Clone ID: LIB104-012-Q1-E1-E11
gggtcgactgacggagattaccccatcatcatgctcgctacacgtggcattgaccgtctcgacacagcactcctcctgcgcacgcggattgccgtctcgatccacatgcgacagtgttgctccgaggcattcaccatgttggccgcctcttctcagcacgtgaccaaccatacactcttcttacacatgcacggagtgcttgcccatgtacacgtcatcgtcatcccaggttacgtgtccaaaatcctgctgatcatcaagaaggactgcattgcacttcagctgctgaccgttttcctccatggcacaaggatcgcggtaacacaacagggatagacgtcaa

SEQ ID NO: 6937 - DNA, 374 bp, Triticum aestivum
  Clone ID: LIB104-012-Q1-E1-E12
cttgaaggatggtgatcctggtttaaccttcaaaggcgggaaaaaaattcaaaggccccaaaaaacggccccaagggtacggccccccaataatggacggttcaaccattggagcacctcattaaggtgtacgacggcgaagatgaagcaagacaagacagataacattaatctgaagtgggagtctaatagcatgtgaatagatgatgtaaaatacatcaccaaaaagtgctagatgtaaaatgcatcaaccacgccgtggccgctctgacggatgctgtaaatactgttgactctgaacttaattgaagaaactgaactttacagtcgaaactgaattttactgtggaaactgaattttactgatgaaactg

SEQ ID NO: 6938 - DNA, 426 bp, Triticum aestivum
  Clone ID: LIB104-012-Q1-E1-E2
gacaacgatgagaatgaattagccatccttgaattcatacatcttctcgtggaaaccatggaccgtcactttggcaacgtgtgtgagcttgacatcatgttccatctggagaaagtccacttcatgcttgaagagatggtgatgaatggttgcatcgtggagacgagcaaacagaacatattggcgcccatccagcttatggagaaaacctcgtaaatagtgtgtgaactcaagagcgcctaggtgatgcttagcctcttcctcccgccttcaccatagattcccccgttgtgtgaggagaaatgccgaacaactgctgtatgcatgggtggctgtgttcacccgactggaaaatgtgaaatgttctgtaatgttgaaaatgaagaccccatcattacttaacaacagttctgtaaaataatactg

SEQ ID NO: 6939 - DNA, 373 bp, Triticum aestivum
  Clone ID: LIB104-012-Q1-E1-E3
gggtcgaccggggcggtgaccaagaccctgaactacaacaagcaacatagcgtggacatgcacctgctgccccctcaggtacagaatcctgtatatggctggtatgacagaaccactgctgttagtagtacatagataggcctgtaatttgtgacactaattctttttcctcctctccctgatgccaacggcaaagccttgttcattattatcaatacgaactacagactgcttgtagcactagataagagttgtgtattcgatccctttgagttttgatggccattttcactgggacgctcacatctttgtatggctggtacagtagcaatgagaatcctatgcccaaaaaaaaaaaaataaaaaaagaaaa

SEQ ID NO: 6940 - DNA, 273 bp, Triticum aestivum
  unsure at all n locations
  Clone ID: LIB104-012-Q1-E1-E4
ttcctttttgatggtcgtaggctccgtggtgagcagacccctgatgagcttgagatggaggaaggcgacgagatcgacgccatgcttcaccagaccggagggtgctttcctggcccttagaaggagcttgctgcagcctggctgttctatgtcgtatgctacctttagaactagagtaaaatgtaagaagtgaaagaacttgtgaggctatggttctgtgccatagcctgaaggggggtctggaggtgaaacaacatcngagtactgttgatg

SEQ ID NO: 6941 - DNA, 133 bp, Triticum aestivum
  Clone ID: LIB104-012-Q1-E1-E8
tcttaccatccggcgttaaaacttttgttcctaaggcgggcaccttaacatcaagcgttgctgaataagttcctgcggatgctgttgtatgtaatagccagacattataaatatatcggatgttccactgtct

SEQ ID NO: 6942 - DNA, 386 bp, Triticum aestivum
  Clone ID: LIB104-012-Q1-E1-E9
ctgcaaactatcaagttatatacatatatacataaatggccgcacaggaggcatcataatactttcaggcaaaattataaacacaacctttataatttaataaacattgttcttacaatgggaatacatgtcactagaacataatatttttcgagcaccgagcctctgttaaacgagcgccttcaaggacttcttcaaagtagtgcccggccgatactcggtctacggccgaactgtgggttgcaatagcggtggcctccatctctgcccagtatgtcttgacacaggcaagagccatccgcgcaccctctaggcacgccgacctcttcatagcgtcgatgcgcggcacagcaccaaggaactattgcactaaactagaataacta

SEQ ID NO: 6943 - DNA, 419 bp, Triticum aestivum
  Clone ID: LIB104-012-Q1-E1-F1
gggtcgacgggggagaagatattgggaggggcaatggttttgttgctgtcgaaataccattcacaccacgtgcaaaacgtgttttagagctttcattggaggaagctcgccagctaggacacaactatattgggtccgagcacttgcttcttggattgcttcgtgagggggaaggggtggcagctcgcgtacttgagtctcttggtgctgaccccagcaatattcgtacccaggttgtccggatgattggtgagacaacagaagctgttggtgctggagttgggggagggaacagtggtaacaagatgccgacacttgaggagtatgggactaatttaacaaaattagccgaggagggaaagctagatcctgttgttgggagggaaccacagattgaacgtgtcgtacaaattttgggc

SEQ ID NO: 6944 - DNA, 375 bp, Triticum aestivum
  Clone ID: LIB104-012-Q1-E1-F10
acaacgacttagttttggacaattcggttaaaaacctcttaattattaaaaataaacccattttcacaaaccaacacaaaatcctaattggtaataagttggattccaaaaaccaaagattacaaaaaggttcaaggtgcaaaggaaaaaaacctaaggctgtagggaataagattcctcctgtgtctgatgacaggggaatgcagtaaacatcataagcatcaaaactatgatctggaacagtatcctgaataaactattttctggattatgaatgaattctgaatcatggggctataagtgaattatgtaacatggatttgtaactatggtggatgttaagttaacgttctatcactgcaaaataaacaaaaa

SEQ ID NO: 6945 - DNA, 182 bp, Triticum aestivum
  Clone ID: LIB104-012-Q1-E1-F11
acggattaagaattcctcctgtgtctgatgacaggggaatgcattaaacaccataatcatcaacactatgatctggaacagtatcctgaataaactattttctggattattaatgaattctgaaacatggggctataagtgaattatgtaacatggatttgtaactatggtggatgttaagt

SEQ ID NO: 6946 - DNA, 372 bp, Triticum aestivum
  Clone ID: LIB104-012-Q1-E1-F12
gtcttttgttttagttttgatttttcttttatgcaccatgatggtatgaaatagcccttggttgatttataaaaggccctttgcacttcacttaaaccttttgattatggaatgatcaaaggcttcaggtgcttcacttcaatcatttgaattttggattgcctgtttctcttcacttagtcaaccgccatttgtacaatgctcttttgcttcacttacatttgtaaaaccgtgggcatatcttttgtagaaagaattaaactctcgtgcttcacttatatcaatttagagagatgacaggaactggtcattcacatggttagtcataaaatcctacataaaacttgtagatcactgaatatgataagtttg

SEQ ID NO: 6947 - DNA, 345 bp, Triticum aestivum
  Clone ID: LIB104-012-Q1-E1-F2
tacggtgaaatgagcttctaggtcgtatgatcagtgatcagatggcacatgcatagtacttgtactttctgcgcatttcccaaactccctcaaccgtataatgccaaaacaatcaaacctcctaatggtggccgttaaatttcaatgaactcccatcaccatagaaactaaacagtgcgggagcacctcatattctcacatgcgagaaaacatagggtgctatcgcatcttggatgctacggtgatacaagctttgaggtcatttgatgtgagatccaatggcatcggagcactctttgtgcttgtaaacagtggcagaactcttttggggcttttctgcaaaaa

SEQ ID NO: 6948 - DNA, 437 bp, Triticum aestivum
  Clone ID: LIB104-012-Q1-E1-F3
cggtcgaatattccgggtcgacgggccaccgcatgaatatgttgcttaccctttgcaataagcggttggattctttagatctaatgatttccgaatatgaagggaaatgtaaagaatctcctcccggattcgagcatgactccgctaaaaaatttaaaaccaaagatggcaatacctagatctattcttgcctttatgcctagctaggagcgttaaacgatagcgcttgttgggaggcaacccaattttatttttgtttcttgctttttatttatgtttagtaataaataattcatctagcttctatttagatgtgtttttatgttttaaattagtgtttgtgccaagtagaacctttgggaagacttgggtgaagtctttatgatcttgctgtaaaaaacagaaactttaacgctcacgagattagctgccatttt

SEQ ID NO: 6949 - DNA, 419 bp, Triticum aestivum
  Clone ID: LIB104-012-Q1-E1-F4
ccgggtcgaccggcagggagaggtgaattggatacatctaaaatgtaccaattccttttgatgtttaattcctactccctccattccaaaatatagtgggctcgcgcttcccgaggtcaaactttgaccataaatttaaccaatgagactgactgcgatgggagaaaaaattatataattaaaaacttcttttgaatatgaattcattggtataacttttgctcccgccgcagtcgatctcgttggttaaatttatggtcaaagttgaagcacgggaatagaggaagcactatattttggatcggagagagtatgttttttaaaaaaaaatagactagcatactaataaaatgcaagaaggcatatttccctttttgaggtgctgcgggaaataactttgaaatattcataggacaata

SEQ ID NO: 6950 - DNA, 427 bp, Triticum aestivum
  Clone ID: LIB104-012-Q1-E1-F6
aattcgccgggccgacggggtcacttatgttaattattatttgaatgcaaaacttatgcttcatttgcttcaacttataattttaaattttcactattctactagcgcatcccctactatgcaagaatttttgtcttggataagataggttctagtgctatagatgatatggaggtaaagagagtttacttgaagacggagcatgggtatactttcaacgtcaaattatataatggagacacatacacccattttgaatgcaaaacttggcaagcactatgcaaggcttatgcatttgagcctgatatggttatcacctttgatattcgtccggaagatgatattgaaggtaatatagacatctgggtcgatgtgcaaacgcctccagttctaccatttggtgactttttctcaaccatgcatgcat

SEQ ID NO: 6951 - DNA, 399 bp, Triticum aestivum
  Clone ID: LIB104-012-Q1-E1-F9
tccaaaattcaatgaaaggacggtaaccctggtaaacaaaaaatccaaaccccaacaaaacctaattcacccctgggcaacttccaaatgattgactgacggccgggaataaaacaacggtgctaaacagactcggccttggggtagatccgtacggcgacggccaggcccagtatcgcgagggggaccaagaactggaggatcttgatgactaactccggaagggattaaagttattgttaatgatgatgacttcagcaccatttttgctgatattgagggccctgctggaactccatatgagaatggagtattccggatgaagctattgttgtctcgtgacttccctcactctctcccaaaaaggttcttctcgacaaaaataatccatccaaacat

SEQ ID NO: 6952 - DNA, 366 bp, Triticum aestivum
  unsure at all n locations
  Clone ID: LIB104-012-Q1-E1-G10
ggcgagatcaaggaattcctgctgacggcgcgccggaaggacgcgcggtcggtgcggatcaagaggaccaaggacgccgtcaagttcaaggtgcgctgctccaggtacctctacacgctctgcgtcttcgacgccgacaaggccaacaagctcaagcagtccctcccaccaggtttgagcgtccaggaggtttaagcatcaagccagacaatgccttttctagtagcgggaatgttctatccatcttgctttagtaactgttagcaggctctccttgtttacccccattaagagagttttgatgtcncaagactggaatgtaatgttgggagctatgtggttgaacctgtcaggatttttgtgtaa

SEQ ID NO: 6953 - DNA, 396 bp, Triticum aestivum
  Clone ID: LIB104-012-Q1-E1-G12
aaggctaagttaattggattcaactacatgcgtgaacatgtgccaagtcgagtcactcaatgcatttaaaggaggataccaccccatcataccatatcataatcattctaatagcatgttggcacgcaaggtaaaccattataactcatagctaattaagcatggcacaagcaactataatctctaaatgtcattgcaaatatgtttacttcataatagctgaatcaggcacgatgaatcatcatatttacaaaaacaaaagaggtcgagttcgtaccagcttttctcttctcaataagtccatcatatatcatcattattgcctttcactcgcacgaccgaacggtgtgtataataataagagtgcacgtgcattggactaagctggaatctgca

SEQ ID NO: 6954 - DNA, 423 bp, Triticum aestivum
  Clone ID: LIB104-012-Q1-E1-G3
gggccgacgggaccaaggaaaatacaagcactggaacgaggggacagtttgtgtggcatggtggacgcagtgttaggatagcaaaggctaccgaaaacgcaaataaatgaataggatggatgggtgatgtatagtgctaagtatgggaaggaatagaccacgcctgggcctttccattacgtcttaattgtatagacaagtatgtgcaatcctgtctaatcttaaccataaaagggagatcacaaatatatttcatggtcctcggtttagggaattaggagtatatcacaatcccgtgatatattagtctgacagatatgaataaagataatctaagatggatattaggtaatgattcatgttcagtacatatattatcttacagccaccttctttacttgttcaggcccgcagctgatgctc

SEQ ID NO: 6955 - DNA, 385 bp, Triticum aestivum
  Clone ID: LIB104-012-Q1-E1-G4
gggaaggttaaaaacctgattggcaggatattgaattggctgaagcccggtgggcaaatttccatcagggaatcgtgcttcaacaattctggggattccaagaggaaagtgaacccgacgcactaccgggagccgaggttctacaccaaggtgtttaaggaatgccactcctatgaccaagaggggaattcctttgagctttctctggtaacttccaagtgcattggagcttatgtgaaaagcaagaagaaccagaaccagatatgttggctgtgggagaaggtcaagtgcacagaagacaaaggctttcagagattcctggacaatgtgcagtacaaatccactggaatcttgcgttatgagcgcgtgtttggggagggttatg

SEQ ID NO: 6956 - DNA, 433 bp, Triticum aestivum
  Clone ID: LIB104-012-Q1-E1-G8
attcccgggccgactatcacgatgtccggggtcttgtcgcgaatgatccgcatctccatactcagcgaaaatagccgagcgaaggtgtagtgcagcggatgaaggttcaacatactgtggatgtcatcaaaacgcatgacgattgtacgcccgatggagttatccacaaagccattgccctctggcaccttggccgctaaaaccgggtatgccacatccttctccctgagacgccgcgtctccaaagcacgaacactgtcatgcacactctgcataacaccagttgcagcattgaacatatttgtcggtggcattgccctacccgccacatgcaccctcctcgagatatcctgcggtgaacgtggcccgtcctgagcactgatcatactcagtgccggctggctcgcacccttcctagtctttcttttgggtg

SEQ ID NO: 6957 - DNA, 385 bp, Triticum aestivum
  unsure at all n locations
  Clone ID: LIB104-012-Q1-E1-G9
cccgggtcgaccgggaaggttaaaccttattaccaagaaaaattgaaaaggaaaaaattgaaaagggcaaatctgaaccgaagattggcatccaagaactcccccttgccaacttcaagaaaatgttaaatatcaggaccagcaggggaaaattaggaggtcatccacaatggatctcctttgtgtctcaaaccagcttctccgtgtccttggttatttacttgaacgaaactgaaactgaaaactgtgaggatcgaacttcgatgtctttagagctactctgttttaaccttggtttaccatctcttcttctttcactgtatgctttgtttttcgccgtcaaagatgcgattgggccaacgcttctagtcctcangcaagacat

SEQ ID NO: 6958 - DNA, 449 bp, Triticum aestivum
  unsure at all n locations
  Clone ID: LIB104-012-Q1-E1-H1
ggtccagaaatcccgggccgacggggagcacaagaaggcggaggagcacaagaagaaggacggggagcacaagaaggacggcgagcacaaggagggcatgatggagaagatcaaggacaagatcagcggcgacggccacggcgacggcaagaaggacggcgaccacaaggagaagaaggacaagaagaagaagaaggacaagaagcacggcgagggccacaaggacgacgacggccacggcagcagcagcagcgacagcgacagcgactgagccagctccggccgcgctccggcagcagcgtgcagtgtaggcgagatcgatgaacgcttgggagaagtgtggcatacatatatgttgcagggtttggagcgtgtggtagcatatgtatgtaatgcgtgacatgtctcatggatcntgtgatgtataataattagccggctgcactgca

SEQ ID NO: 6959 - DNA, 432 bp, Triticum aestivum
  unsure at all n locations
  Clone ID: LIB104-012-Q1-E1-H10
cgggtcgatagtggatcctacatattctacgaagatctttatcggtcaaactgcataacaacatacgtcattccctttgtcatcggtatgttacttgcccgagattcgatcgtcggtatcatcatacctagttcaatctcgttatcggcaagtctctttgctcgttccgtaacgcatcatcccgcaactaactcattattcacattgcttgcaaggcttatagtgatgtgtattaccgagagggcccagagatacctatccgatactcggagtgacaaatcctaatctcgatctatgccaacccaacaaacaccttcggagacacctgtagagcgtcnttataaatcaccggttacgttgtgacgtttgatagcacacaaggtgttcccccggtattcgagagttgcataatctcatagtcagaggaatatg

SEQ ID NO: 6960 - DNA, 404 bp, Triticum aestivum
  Clone ID: LIB104-012-Q1-E1-H11
gggtcgacggggcagttggtgcccctctcggagcagcagctggtggactgtgaccaatacgacggcgggtgcaaccgcgggtcctttcacagggcctacaattggattgtggagaatggcggccttaccacggcagcggattacccatacacggcggtgaggggcgcctgcaaccgcgccaagtccgcccatcacaccgtcaagatccttggcggcggcgtgatcccgcccaggaacgagcccgaaatgcaggtcgccgtctccgggcagcccatcggcgtggctatcgaggtcggcagcggcatgcagttctacaagagcggcgtctactcgggcccctgcgggacaaatcttgctcacgccgtcaccatcgtcggctacggcgtcgatgcccctactggggc

SEQ ID NO: 6961 - DNA, 411 bp, Triticum aestivum
  Clone ID: LIB104-012-Q1-E1-H2
gaccggaaggaagaggtatggaccgagatcctccaggagaacgagcttgtcacgaccgagctcgaggagatcaccagttgggggttcgtcgatgccatgttcaatatcgacattgagcatttggacaacatgaacaagagcaaggagcatgggttcctcggcttccgtaacaccgtcaactccttcaacgcttggatcgataagatgaaggcttccaaggttgttccgtgatgctcttattgtctagtatctattgttgtctacagcatatgctactgcatcccattttatcactcatttataaatttacttctgaaattagttacatcccatcatttgtgccaaatgttgtaatctagaataagccagaaccaaataaagctcccaagttgttaatcgattatctgtgct

SEQ ID NO: 6962 - DNA, 391 bp, Triticum aestivum
  Clone ID: LIB104-012-Q1-E1-H4
gacctccgcagacactgtggacctcaagccaacgaacaacgacactggcgaactcatcatgcaccttgagtgggttaacctccccccaagcatgtcacagtgaattgatttgacttgcaaagggagggcagctaatgtctgccttttgtgcttctaatgttgcctcctcgatatatgatctatgaagataattaagcgatgcctagctcattcgttacataacacccaccgtaatgatttgtggattacaacagcatggtgagtatagaataggagcatcttcgtgatgagatccgcacatcatcacagtgggtgctacgtaatgcatgtgatatacttatgctgctgggggtaatgcatgctttcagttttggttctgcatatattgtat

SEQ ID NO: 6963 - DNA, 416 bp, Triticum aestivum
  Clone ID: LIB104-012-Q1-E1-H6
acggggtacagatacggcggcattatagatactcggatgaacgcaagggaaaactggcaggcttttccgatccagtgaattagtgctggctgccaaacgtttgaaagagtagattattttttcaaaagagtctggctgccgggttgagcccctttacttttgccggagggttattatagtggtgtgggattcgatgcaacgataggttacagagactttatatgatacggttagttttcccatttgcatttgcaggactagttatgacctcccctgtgtttcttgggagatttcctttctttactgttgtagaagtgcaaaaatgtcttcgtatgtactagctacatataggtagtagtagctcgtacaatgggtttagtagaacacaccattgtcatgtgctgttacctgcactt

SEQ ID NO: 6964 - DNA, 367 bp, Triticum aestivum
  Clone ID: LIB104-012-Q1-E1-H8
ggcagcgcatgatggcggagatcgacaccgatggtgacggcttcatcgacttcagcgagttcatctccttctgcaacgccaacccggggctcatgaaggacgtcgccaaggtcttctgaatcagttcatttcacctcagccgtccgatccaggagccgatccatctacgtacggcttcgtatatcaatttcatgcaactacctactccggtcccgatccagcctcagcttcacctgaggccggccctaattttgtttgatcaattttttgctactagtagtaactagtgatgatcactgttgcaccatttatttattttatatcgtcacaactttccagtgtttcttttctttctctacctttttgt

SEQ ID NO: 6965 - DNA, 406 bp, Triticum aestivum
  unsure at all n locations
  Clone ID: LIB104-012-Q1-E1-H9
cggtcgaaatacccgggtcgacgggtgggcacacaaatgaggggtcatgtttaaagctatataatttagttgctaaccccttcatatctttccaggatttacggtcttttgatctttcctccatagccgctataatctctggcctgtgcttttctcttagctcttgcaatcccatttctttgactgactgaaaacccatacaagctgtcaatacaagttggctgctgtcaaaggtagagccagcaagagactgcagtaacgtaattgcatctccagcatcctttgtggtcaccaaggcangccctaaaagttaacataaaagatatagtgttgggtagacatcaaagtttagtcaaatgaacaaacaataggacatagtaacattttcagattaatccaaaaacag

SEQ ID NO: 6966 - DNA, 377 bp, Triticum aestivum
  Clone ID: LIB104-013-Q1-E1-A11
gtcgacgtcgtcaagaagggttacgtcggaatccacagctcagggttcagggacttcctgctcaagccagagctgctccgtgcgattcaggactgtgggtttgagcatccttccgaagtgcaacatgaatgcatccctcaagccattctcggaatggatgttatctgtcaagcaaaatctgggatgggcaagactgctgtttttgtcctctcaactctccagcagattgatccggttgctgggcaagtagctgcacttgtgttatgccatacacgagagttagcataccagatttgcaatgaatttgagaggtttagcaagtacctgtcagaaacaaaagttgctgtcttctatggtggcgttcacataaaaaaaca

SEQ ID NO: 6967 - DNA, 342 bp, Triticum aestivum
  Clone ID: LIB104-013-Q1-E1-A9
aatccttaaccctttaaaaaagctgttaataacaaacgcctccgcctaatccccaaagggcaatcaaacgggccggttggattaccatgtccgttttgatgaaaaccccaataagaggacacgatctctgctttgacaagacgtgcaaataaaactgcatcttgaaacatggagcaagaggcttaaaaatagttcgaaataatgaccgggcagcgacgtgatgtgacgctacaaaagttgtcagtagattggactcaagaaatattatactctctgcggatatatgtggtacttgttttgcagagccggacacgttttttatgttcgaaggctattttggag

SEQ ID NO: 6968 - DNA, 367 bp, Triticum aestivum
  Clone ID: LIB104-013-Q1-E1-B11
gacggggacattcagagagatactgccatgcatcattctgccgttacatttattatgacacgcttcatcacatgtcatattgctttgcatgatcatgtagatgacatcgtatgtgtggcaaagccacctttcacaattcattcatacatgtcagtcttgattcattgcacatcccggtacaccgctggaggcattcatatagagtcatattttgtgctaaatagtgagttgtaattctagagttgtaagtagataaaagtgtgatgatcatcattattagagcattgtcccagtgagcaaaagatgatggagactatgattctcccacaagtcgggatgagactccgggtgaaaaagcatgtgttta

SEQ ID NO: 6969 - DNA, 336 bp, Triticum aestivum
  unsure at all n locations
  Clone ID: LIB104-013-Q1-E1-B5
acggtcctagaatcncgggtcgacgggcgctgcaaaaactccggcgacggcgacatcgtggtttagggagagtatgttaggataaaccacgtatatgggtgtcgtgcgcgcagccgtggctggctagctacatgcgtggccgggtgatctttcgtgtgcgcatgctagttggttagttggctttgtggccggtgcgctgtgtgtgcatgcacgatgctatgcaagtttgttagtcacggatagactcccgggaggtgagccagatgtgagtggccgggtgtgacggccaactaagtgggcgtgcatgcaagtcatggtgtgcgtgcgtgtgtgtaa

SEQ ID NO: 6970 - DNA, 378 bp, Triticum aestivum
  Clone ID: LIB104-013-Q1-E1-B9
ccccgagcacgcttgtacgtgatacctttcaacttgccaaagagaaagctccgtgcattatcttcatagatgaaatcgatgccattggtacaaagcgtttcgacaggtacaaatctttttctgattccagttcatgtatttctgcactttctcagctatttgctcaaatcacattctttggttgagagtacagtgaagtcagcggagacagggaagtgcagaggactatgttggagttgctcaatcaacttgacggattcagtagcgatgaacgtattaaggtgagtgtctttatccattctaaggactaatcatactggtcttaaaaatcgttctcaaagaaacagtaacaaccatacctttctattttttcaggtg

SEQ ID NO: 6971 - DNA, 62 bp, Triticum aestivum
  Clone ID: LIB104-013-Q1-E1-C2
gactcccgggccgacggggatctccacagtgaggccgaccaggctctgcatgcgacccatac

SEQ ID NO: 6972 - DNA, 359 bp, Triticum aestivum
  Clone ID: LIB104-013-Q1-E1-C4
gacggtgatgctcatgttgtcgttgacatgtcgtctatgtgcattggcatgagattcgtgaacagccaatgcatgggtcgctactggacgtcattcatagctcctggcagagtcgcttcccaggcgagtgttgccagattcgacgggcatttttgagatccaggaccaacctattggttgtatttgaggaggaccttggcaagccgggaggcatactcatccagacagtgacgagagatgacatctgcggtgttcatctcggagcacaagcctgcagagataaagccatgggaggagcatggaggccagatcaagctcatagccgatgaccagaacactccgggattctttaagtgccc

SEQ ID NO: 6973 - DNA, 376 bp, Triticum aestivum
  Clone ID: LIB104-013-Q1-E1-D12
gggcatcatgaaacaggggactgcggcggcgagtggggcgtttaccgggggaggcgatgttcgtgctggcgcaggcgagaggaagatctccagcctaccggcgtacctcgccacggccgtggagggctgccacatcacgggcgacatcgtgcggcgcttcgcggagatggagctctcgccgctgctccgttggctgctgggcttcagagggtccagggagcgcctcctcaccgacgacctcttcatcgccaagctcgccatggagatgggcgtcagcatgatcgccaagaccgctgccgagtacgagaagagacgggagaacttcgtcaaagaaattgacatcatcatccctcatgtgggtgaggtcgtcattcaa

SEQ ID NO: 6974 - DNA, 392 bp, Triticum aestivum
  Clone ID: LIB104-013-Q1-E1-D9
acggggtatgccacggatggcatcccctctttcgtcttcgtccaacggttaacttactccgaactaaaattttaatcacaacttatatgtttttgcttggagcgtaattttatttcctttattttgcttgctgcttgagtaaaataccaagatataaatttattaaatgctagagagtcttcacatagttgcataattgttcgattactcattgatctccacttatatctttcagagtagtttgtcatttgctttagtgcttcaattatatccttttagagcatggcggtggttttattttgaagaaatagatgaactctcgtgcttcacttatattattttgagagtcttttagaacaacatggtaattttcttttaggcataataaaaac

SEQ ID NO: 6975 - DNA, 349 bp, Triticum aestivum
  Clone ID: LIB104-013-Q1-E1-E10
tggaaatataacacttagagcaaaagaacaagtaatagttacaactatatgcatatttgggtggtggaggctctacggttaatatgggtttgcgaaaagccattttttttcctacaataaaggaatatattttgtttaactattatgttacttgataaacaatgagaaggttcctccgactcaatcccaattaagcagtattaataacccaacaaactaatttacagtgttgagatcagaataataattcaagaaccagatactcaagatgtcgataaccggggacacgactaaccatgactactttgtacactctgtaaaggtttgaacacttttccccataagactc

SEQ ID NO: 6976 - DNA, 163 bp, Triticum aestivum
  Clone ID: LIB104-013-Q1-E1-E6
aatcttagacgcctctcacttcatggaaccatccacacacctagttcggtctattccctcgcttcatcacggatgctcctcagttcggccgatgcgataatgaataagccgatgtgctttggtgtaactccaacttgtggaggatcataacgctcaaaactta

SEQ ID NO: 6977 - DNA, 417 bp, Triticum aestivum
  unsure at all n locations
  Clone ID: LIB104-013-Q1-E1-E9
tagccgtccagaattcaagggtcgacgggatggaatatgctggcaatataacacttagagcanaagaacaagtaatagttacaactatatgcatatttgggtggtggaggctctacggttaatatggttttgcgaaaagccattttttttcctacaataaaggaatatattttgtttaactattatgttagttgataaacaatgagaaggttcctccgactcaatcccaattaagcagtattaataacccaacaaactaatttagagtgttgagatcagaataataattcaagaaccagatactcaagatgtccataaccggggacacgactaaccatgattagtttgtacactctgtagaggtttgagcacttttccccacaagactcgatctcctccgttggatttctcacacta

SEQ ID NO: 6978 - DNA, 420 bp, Triticum aestivum
  unsure at all n locations
  Clone ID: LIB104-013-Q1-E1-F9
acggggatgagtagagcatcggagacggcttcgtcttgagtcccgtgagccggtccatgtcncatgtcctactctacctcgccggcgaccggagcaatagtttgagggccgcagccggccgctgtacatgggcacggtggagccggacgagcttcacttagattaggtttcatgttgcatgtaataatatgtatttggtgttttgaaattatgtttgtggttgtggaatcattttttataagatgtccgatcaatatccacggacgcaccgcggttgggggccggattttggtgtttgtggttgtacatgctttaagtgtgcatgcaatacttgatatagtggagacatagtcagatatttgtcaggaagtgtcagctgtatatagaaatgcattgcacaaacgaatcctttcccacctt

SEQ ID NO: 6979 - DNA, 287 bp, Triticum aestivum
  Clone ID: LIB104-013-Q1-E1-G10
gcaacgctaccataactcatgccaaagagctgctgcatgttactcgttggattttcttatatgttgcgtccatgtcatgtttgcacacatactgaacaccattttctgtaaactgttcgagtcctatgttgaactgagaatgttttgcctgttttggttgtgatcaaaaactatccagattctagtatgtgttgttccacctacatcaccgtcacgttcggcaaggccttctggattaatgataaagtgatcagctcatcaccggagaaaaaatcggccgccctaaa

SEQ ID NO: 6980 - DNA, 381 bp, Triticum aestivum
  Clone ID: LIB104-013-Q1-E1-G11
ctcacggtcgacgggaaacttaacatagactcggtttacggtgagtggcatgccgagcgaccgtgtggggtcgagccgtggaggaaggtgagacacgaacacgacagacgtgatttaaatgttggttttgctcgatggcgcgatccaacaaaatgaaacgttggtttctctccatttccattttttctacggaaaaacggaaactatccactccattttcattcctattccaaggttgccccgttacaacattccatcaaatacaaaggaaaactaaccactacaagaaatatgtcaacttgtgaccttgactattggtcactgaaaggtcattgtttttcatttgcgacctttttgttaccaaaaatagaaggtcaaaag

SEQ ID NO: 6981 - DNA, 371 bp, Triticum aestivum
  Clone ID: LIB104-013-Q1-E1-G12
acgggcaactcaacgtagaatcggtttgcggtgagtggcatgccgagcgaccgtgtggggtcgagccgtggaggagggtgagacacgaacacgacagacgtgatttaaatgttggttttgctcgatggcgcgatccaacaaaatgaaacgttggtttctctccatttccattttttctacggaaaaacggaaactatccactccattttcattcctattccaaggttgccccgttacaacattccatcaaatacaaaggaaaactaaccactacaagaaatatgtcaacttgtgaccttgactattggtcactgaaaggtcattgtttttcatttgcgacctttttgttaccaaaaatagaatgtcaaaag

SEQ ID NO: 6982 - DNA, 273 bp, Triticum aestivum
  Clone ID: LIB104-013-Q1-E1-G9
tcacggtcgaccgcgacggatacctcacatacggcggatactcgagcatggttgtggtgcacgagcgcttcgtggtccagttcccggacgccaagccgcttgacaaaggcgcgcccctgctgtgcaccggcaacaccggtgtacaaccccatcaagtaccacgggcgtaacgccccgggaatgcactcggcgtgctgagcctaggctggctcagtcacatcaccgtcaagttcggcaaggccttcgggattaatgtgacagtgatcagctcat

SEQ ID NO: 6983 - DNA, 316 bp, Triticum aestivum
  Clone ID: LIB104-013-Q1-E1-H10
gtcttccacaagtacttcaggtataatgtgctcgcttcttgcaaacaatgatagatgcactgaggagaacggagccatatctatcagctcatcgcccgatttagaccatcaatccgttcggggtcgacacctatctcaacagcaaatcgacgtcgtatatgggaatgaccttcactcgctcccaagattacgcgctgcgcctaagccggcccatgaacatcagctttagtgcggaatccccgcatataaaactacacatctgattcgatatgatcatcctgtgtccatagattcacccatgatcgttgatgcaaaa

SEQ ID NO: 6984 - DNA, 384 bp, Triticum aestivum
  Clone ID: LIB104-013-Q1-E1-H12
cggggatctatactcgcttttatgcctagctaggagcgttaaacgatagtgctagttgggaggcaacccaattttatttgtgtttttttgtttttgtttctgtttagtaataaatcttgcgtctaccttctgtttagatgtgtttttatgttttaattagtgtttgtgccaagtagaacctataggataacctatggtgatagttaatttgattctgcggaaaaacagaaactttgcgcgcacgaaaataattttgttaattcacacaaacgagctttttcgttgattcttttttctgtagatcaatagacaaattgctcaggatttcctattttggtaggattttaaaagttccagaagtattcgagggttacagattgctac

SEQ ID NO: 6985 - DNA, 397 bp, Triticum aestivum
  Clone ID: LIB104-013-Q1-E1-H9
attcacggtcgacgggatattcaataattgccaaaagcctaagctttggggatgcccccggggaaaggcatccccctcctttccgtccttccgttcaattgggtaaactttaacttgggagctatatttttaatcgccacaatataagtgctttgcttggagcgtcatgtatgatattagtatttgccttttagttttccacaatcatccttgctgtacacaccttttgggagaagcctacttgattaaatttattagaatactctatgtgcttcacttatatcttttgagctagatagtttttgctctagtgcttcacttatatcttttagagcacggcgatggcttaatttgtagaaattgctagtctctcatgcttcacttatattattttgag

SEQ ID NO: 6986 - DNA, 400 bp, Triticum aestivum
  Clone ID: LIB104-014-Q1-E1-A10
gtaccgtacgaaaattcgccggtcgacggggtccaggattgacaggaagctgctggtctatcccaagatgctgttcgtcagatccaagattggggagggcgcccacggcaaggtctacaagggcaagtatggtgatcagattgtagccataagagttctcaacagtggcggtacccccgaacaaaaagtaacacttgaagatcgtttcatccgagaagtaaatatgatgtgtaaagtgaaacatgataatcttgtcaagttcattggagcctgcaaggaaccattgatggtgattgtgagtgagctgctaccagggatgtctctgaaaaattacttgaacagcatccggcccagccaactagatatgcatactgcattatgctatgcactcaacatagct

SEQ ID NO: 6987 - DNA, 412 bp, Triticum aestivum
  Clone ID: LIB104-014-Q1-E1-A12
ttcgccggtcgacgggtgatttcagagaaaaccggagtgccggaggggttaccggaaccccgcggggaagtattgggccttagtgggccttaggggagagagagggcagcatcccaggaggtgccccccaaggggagtctgaattggactaggggaggggggcgcggcccctcttttcctctccctcttcctctctttctttcccccttcccccttcctagtaggactaggaaaggctgaatcctactcctactaggaggaggattcctcctctccttgggcgcaccaagggctgaccggcctccccccttgctcctttatatacaggggcagggggcaccctagataacacaaattgattgttccaagccgtgtgcggtgcccccctccaccatattctacctcgttcata

SEQ ID NO: 6988 - DNA, 433 bp, Triticum aestivum
  unsure at all n locations
  Clone ID: LIB104-014-Q1-E1-A2
cgggtcgaccgggtactacaagcgagaccgaagtctctctacaaaaacataaaataggcaaacttaattacaaattttaccaagcaaggaacttaacatcagaacctaacaacaatatccaccaattatcaacaaaggaatggtgggggttaaactgcagcaaccaacctttaacccggtggctaaccaaaactacgactgcaagcaactcttttgaggtggcgcacacgagtccacatattcaccatatcaatacaccactatggatccgctcccgtctccctacgagaacgccatccatagcactcacgcttatcttgtgcaatttaaaagtatccactttcacttgtctatgaactgtacaagcaacccagaagtccttttccgcggacacggctattcgaatagatgatgttaaccctgcangggtgta

SEQ ID NO: 6989 - DNA, 218 bp, Triticum aestivum
  Clone ID: LIB104-014-Q1-E1-A3
acagggtccatctacgttattctacacgattactctatagatcaatcactcctaattcactgcgtattaaatcaagtacgtactacggtatttttaactgaagttaaaaggttggttcctgttttaagggtgcagatgtactataacacgtaagtcctactatccaaatgcctcaccatactcttttgaggtggcgcacacgaatcaacggccgcacc

SEQ ID NO: 6990 - DNA, 432 bp, Triticum aestivum
  Clone ID: LIB104-014-Q1-E1-A4
cgggtcgacggggaagccaaaccacctccaaatggcaacccccccattccgaagaccaagctcccaatccggtcccaatgattgcctccaaaaacctccaaaaaacccccggccccccccaatggcgccccccttcttctcaacccccttcaagccctacgtctaccagagccaacagggatctgtgacggcgtttcagatatccggtggggatgtgcaggtcctgcacgtgatggtgaagtcgcaggacaagttgactgcgaaaccaggtacaatgtgttacatgtccgggaacattcagatggacaacaattacttgcctgaaaacgatggaaggcgtgtggcagtggatattttggaaaaagcataaccagcactgttttcttcaatcctggccctgatgatggatatgtggggatttctgcgccattt

SEQ ID NO: 6991 - DNA, 378 bp, Triticum aestivum
  Clone ID: LIB104-014-Q1-E1-A6
attcgcgggtcgacgggtggagcgagaagctgaagcggagctccgccggcgagcagaagtgggggctgttcatcgcgaccaagtgatctggccgctgagcagcgacgccatggacgcgatgattcgggagcagagcagcttctgttaagaaataaataaagaggatcggtgctcgacaatgttgtggccgtgtgttgggtgtgattgtttgtttgttgcagtggctgcattcactggctgggcaccaggatctataagataatgtgtacgtacgtacgtactgtattcctgaacttgtactgtgacgagcgagactcgctttgtaacgtgctattctgttgaaaaaaatcatgcgaactaaaaaaaaaaaagcggccg

SEQ ID NO: 6992 - DNA, 364 bp, Triticum aestivum
  Clone ID: LIB104-014-Q1-E1-A7
aggtgcacgtggccaacggcggtgggctcaccatccagcaccagaacaacgtcatcatcaacaacctccacgtgcacggcatcgtacacacgtcgggcggcaacgtgtcgatgacggcaacccactccacgatccgtacccgcgccgacggcgacggcgtctccatcttcaacgccaccaaagtgtgggtggaccacctgtccatggataattgcgaggacggcatgatcgacgtggtggccatgtccacggccgtcaccgtctccaacacccacctggcccaccacaacgacgtgatgttcttcggcgccaccgatgggaaggaggaggacaaggtgatgcatgtcaccgtcgccttcaacca

SEQ ID NO: 6993 - DNA, 413 bp, Triticum aestivum
  Clone ID: LIB104-014-Q1-E1-A8
attcgccggtcgacggggacagtgacggcgacgacgacgagacggactctatgtgatgcagaggacgtcggcgtgaggtggaggtcggcgcgatgccgctggtggccggttgcggtgtgatgccgcaagatgatgatggtgtggtggtcggcgtcgcgaggatgtcatccatgacaagatggtccatggtgaccggcgctgcgccggtgtcggctgtggcacaacggactccatgcgagatggagcccgactgtgcaagaagaaagatggtggccatgcagtgccactatgtgaagatggcggtgtgaagctgccacaagaagagtcggtgcgatgccgacgatggtggtgtgatgccatcgtcatcatggaaagttggtgtgaagccaacaaaagctgcggtgcgatgccac

SEQ ID NO: 6994 - DNA, 405 bp, Triticum aestivum
  Clone ID: LIB104-014-Q1-E1-B1
ggtcgaccgggaaggtgaaaccatagagagatgtgtatttttaattgagatgttttcaggagtacctttgtgaagctgatatatctttcttttacaagatatgttgcacttgcttcatctacataggctgtctggaatgccatgaggccgggattggtgtatgaaatcttcaaagctattatattggtctcaagaaacttgcaatacatcaatatttttaatttttttgctgacaccacagctaccacctcttcactaaatgacagatgttgccagcaactgcacatggaaggatttaatgttatattatgtctactaatcaataacgagggagatcaaattactgctctcaaatattcacctgattgattttgaaaagagggttaaaaatggtgttatgaatga

SEQ ID NO: 6995 - DNA, 430 bp, Triticum aestivum
  Clone ID: LIB104-014-Q1-E1-B10
attcgccggtcgacggggttgattacaagtatgacggtgtcaacaacgagagcaaagagcgtaagggagggcatggcatcccaaaggtttccatggtcccacttgtcttcctcatattctatgaagtctcaggaggtccctttgggattgaggatagtgtcaaggctgctggaccactcctggcaattgtggggtttcttctgtttgcgctcatatggagtattccagaagtcctaatcactgctgagatgggtactatgtttcctgagaatggtggctatgtcgtctgggtctcttcagctcttgggcccttttggggttttcagcaaggctgggcaaagtggctcagcggtgtcatagataatgctctctatccagtcctttttcttgactatgtcaagtccagtgtcccagctctcgggggtgggct

SEQ ID NO: 6996 - DNA, 400 bp, Triticum aestivum
  Clone ID: LIB104-014-Q1-E1-B11
gacgggtctgcaaaatttagatccgtatgtattttgcaaatctctatgtctccctccttgacttgatcgcggatggaattgaagcgtctcttgatgtgtttggttctcttgtgaaatctggattccttcgccaaggctattgctccattattgtcacaaaagattttgattggacccgatgcactaggtattacgcctagatcggatatgaactccttcatttgcttcttccgaagcagctatgtactccgcttcacacgtagatcccgccacgacgctctgcttggaactgcaccaactgacagctccaccattcaatataaatatgtatccggtttgtgacttacagtcatccgaatcggtgtcaaagcttgcatcgacgtaaccatttacgacaaga

SEQ ID NO: 6997 - DNA, 334 bp, Triticum aestivum
  Clone ID: LIB104-014-Q1-E1-B2
gatgtgtatttttaattgagatgttttcaagagtaactttgtgaagctgatatatctttcttttaaaagatatgttgcacttgcttcatctgcataggctgtctggaatgccacgacgccgggattggtgtatgaaatcttcacagctattatattggtctcaataaacttgcaatacatcaatatttttaatttttttgctgataccagagctaccacctcttcactaaatgacataggttgccagcaactgcacatggaatgatttaatgttatattatgtctactattcaataacgagggagattatattactgctctcaaatattcacct

SEQ ID NO: 6998 - DNA, 379 bp, Triticum aestivum
  Clone ID: LIB104-014-Q1-E1-B3
catgagatatatacatgctagaaactttcgtgtgcagccacaagctattatgggctcctagcatagttgacaaagtcttgcaaactcttacagtggtagactagcagatgtaggggatgtaggttggtacagtctacccgttcgtaaggtgctagcgcttctgaaagactatgtctcgatcatccgtttctcaaacaccatgcagtgcgagaaaaccaacggaggaggtcgagtcttgtggggaaaagtgcgcaaacctctgcagagtgcatacactaatcatggttagccgagtcctcggttatggacatattgagtatctagtacctggattatcatgtgaatctcaacatgttactctaaaattaattttgttggg

SEQ ID NO: 6999 - DNA, 346 bp, Triticum aestivum
  Clone ID: LIB104-014-Q1-E1-B4
catgataaaatacatgctagatactttcgtgtgcagccacaagctattatgggctctagcataatttactaagtcgtgcgaactcttacagtggtatactagcagatgtaggggaggtacgttggtacagtcctatcgttcgtacggtgctagcgcttctgaaagactatgtctcgatcatccgtttctcatccaccatgcagtgcgagaaaaccaacggatgatgtcgagtcttgtggggaaaagtgcgcaaacctctgcacagtgcatacactaatcatggttagccgagtcctcggttatcgacatattgagtatctactacctggattatcatgtaagtctc

SEQ ID NO: 7000 - DNA, 389 bp, Triticum aestivum
  Clone ID: LIB104-014-Q1-E1-B5
actggatatattaacgggcgagccgttacggtgccccggtggccatcaacgcgcactatcacggattgctacctccttcagtgtcatgcagtggtaaaataccatatgctggggatgtacgttggcagagtctacacgtgcttaaggtgctaccgcctctgagcagactatgtcacgatgatccgtttctcaaacaccatgcagtgcgagaacatcaactgacgaggtcgagtcttgtcaggaatagtgctcatacctctgcagcgtgtatacactaatcatggttaccccagtcctcggttatggacatattgagtatctaatacctggattatcaagttaatcacaacatgttactctaagaataattttggtgggttctgtttaat

SEQ ID NO: 7001 - DNA, 363 bp, Triticum aestivum
  Clone ID: LIB104-014-Q1-E1-B7
gataatgcaccactcaggtggagccatcaccaccccaagactcacacgcttccaaagatcatattgaacgctctcaacctcgtgcacaagaccagggtgcacgatcaatcgcaagattgtggtgaacctccaaatgatgcccacagtcattttctcacccacgagaatcttagatataagatgcaagctcaagatcagtatgaagctcaagatggcgcccattattttcagattaaccctcgtccgtccacataccaagacgacttgtcgcgtctaaccacaaagattgctttcaaactcaaaacgaaggtcgattcagtctaaatcgaagtggtagcctaagactcggggtaagtactcgta

SEQ ID NO: 7002 - DNA, 409 bp, Triticum aestivum
  Clone ID: LIB104-014-Q1-E1-B9
gacgggacaatgcaccactcatctggagccatcaccaccccaagacccacacgcttccgaagaacaaagtgaaggctctcaacctcgtgaacaagaccaggggcaagatcaatctcaagatggtggtgaacctccaaatgatgcccaaggtcaagttctccccctcgagcaagttcaagaccatgagcaagctcaagatcaagaacaagctcaagacggcgctcaagataatcaagttaaccctcctccttccacatccgaagaggaattagagcgtcgtgccgcgaagattgcttccaagctcaccaccaaaggccatctcatggagaatgtggttggaagcctaagaaagggggtaatcactcgtagacaattaacaaactattgtgaacatcacgcctttgtcccc

SEQ ID NO: 7003 - DNA, 388 bp, Triticum aestivum
  Clone ID: LIB104-014-Q1-E1-C1
gggtcggccgggatgtcctgtgacggataggtctcgttgtaggccagcccttcgatctccagaaggcaagcctagtgtcctcctctcaaccttcaatgctgaccctagcagcaaccatgattgatcctttgtacgctaaactgaagaaacctcctcacgagtttcatcatgcatgggagtcgaagatattagatgaacatcacatcctgtatgcagcaacggatgcctacctttgtttaaatatctacaagggttggatgaagaagcggagcccggtgtctagttcaagcaaagaagtgtcggcgaagaggaagaggaagagggattaggtcgaagtcgaggacgtggactcggactccgaataggtggtaattccgtcgctcatgct

SEQ ID NO: 7004 - DNA, 343 bp, Triticum aestivum
  Clone ID: LIB104-014-Q1-E1-C12
ttcgccgtcgacgggggcaacaagtgggtcactgtgggtgtcatgctgcgcttcttcctcgtgtgcacgatcatgtgctgggctgtgctggtgaggagggcgtccaagaccactctctgatccttccttctttcccttgtttttgtttgtcagcttcattggattggatcatatatacaagccgcgttatttgtttgcttttgtcctgtagtttgctctttgtttagatgtgttgagtaacaagtgcaatgcaagtttgcactcgtgtgtaaaatgcttgatttgggttcatgaatagaaaatttcaacctgtcaatacagttcactcaacatatatgaaatc

SEQ ID NO: 7005 - DNA, 402 bp, Triticum aestivum
  Clone ID: LIB104-014-Q1-E1-C2
cgggtcgacgcctacctgcattacatcctcggcgacgagtacgagccggagcacgtccgggagcaagaacttcatcggcccgttcaagcaccaatggccatccgcaaccatatccgcatcacagtcctttggagcacaattgacatatttgcagcggacgtgtgatgagcagttttccatccaccgtgcaaaagacccagagctgctcggcggcatgatcgatgacccacctgaagagccgccatcacagtgctcatcgagagcctgatgccccgcaatgaatgggcagaggacctccgcgattcagtcaagacaaaggcagcctgcggcttcatcattgcccgcaacggccatttcaacctcgattccgatgatgtggtggccaagattgagcgcatcctt

SEQ ID NO: 7006 - DNA, 406 bp, Triticum aestivum
  unsure at all n locations
  Clone ID: LIB104-014-Q1-E1-C4
cgggtcgaccggggtttaggtgggctgcaggtgggctgagaagaggagttgggccgagaggagagaagagaagagaagcccggcggtagtttcggagaccgaaacgtccgacaattaaaccggcaacagtgccgctatgttaaacggttgggctatcaaacgaactccgaatgcgacgaaacttggcaggcggtctgtctacactataataagaccacacgacaagttgcaacccattccgagaacatttttatgccactaataaaataatattacggaggtgccgcgggcgcgtgcgagtgtagtcgggctcagaacggacaacggagagaaccggcggaacacgaacggatgcaagttttgaaaaacatgcagatganatacagatgaagtgcagatgatgaca

SEQ ID NO: 7007 - DNA, 396 bp, Triticum aestivum
  unsure at all n locations
  Clone ID: LIB104-014-Q1-E1-D1
ccgggtcgaccggccaggccaacgctgtgtggtggtggtggagtaccagcatggcggcaccctgaagacgctgctgttccagcaccgggacaagaagctgccttacaagaaggtggtccagctggcgctggacatggcgagagggctgagctacctgcactcgcagaagatcgtgcaccgggacgtaaaggcggagaacatgctgctggacaggaagaagtcggtgaagatcgcggactttggggtggcccgtgtggaggcgcaggacgacgacaacatgacggggcagacgggcacgctggggtacatggcccccgaggtgctggangggcngccgtacgaacacaagtgcgacgtgtacagcttcggcgtcctgctgtgggagacgtactgctg

SEQ ID NO: 7008 - DNA, 283 bp, Triticum aestivum
  Clone ID: LIB104-014-Q1-E1-D11
acgatgctaactataacgacacgtccgtcatctccctccaccccgacaccatattagaggctccagctcttcctcggcgagaccttccttctcaacggtaacacgacgaatgactccatctgcattgttcttgctgattacatctgtgatgagcctaaagtcataattatgagatctgtcaagagttaactttagattgaaagatgtgtcatgtggtgtctgttcatcactacgcctagtttcaatacattacacgagtgtatatacttacttttaacaatac

SEQ ID NO: 7009 - DNA, 157 bp, Triticum aestivum
  Clone ID: LIB104-014-Q1-E1-D2
acttcaatcgcagccccttctccagctctgttcttatgcggcaataacttcgctggacgaggataattccttcatcatcaccgactttctgttaatggttttgttcggactcgttaactacggcattacagtgcataccggctcccggtgatacatg

SEQ ID NO: 7010 - DNA, 384 bp, Triticum aestivum
  Clone ID: LIB104-014-Q1-E1-D9
gacgggagaagtaagacttcagacgccgccgcaaggcttgcacaccacaagatccaagatgtcaatatgactgtactccagtttcaacacgtcacatcacattgtcattgccagggctttccaaaaagccacattagtttgataggccaaatgcagacaaaatacattttgatatacatgtgcacaggctcatgtacatccaggagttagtagagtgcttcggacaacttacagcctgctcactcacctagattaccctcaaggcgatcatgacgctggtcgatgcacttgagctgttgcaggccaccaaaagggcaaccgatggcgtcaacggagtcggcaatctattggataaagtcctaaatgcgatttaatgcgacgtca

SEQ ID NO: 7011 - DNA, 360 bp, Triticum aestivum
  Clone ID: LIB104-014-Q1-E1-E3
ggtgattatccatagactatacgggcacaatagatgtacatctacatcatccagggaacacaggggcacatcgtatcttaaagggtacggtggttaagatgagttcatacgtacgaattcggttgatgtaatctctcagcaatctgctgaaaagcattcaagtacgcaacattttatatagagattgctatttgactgttccgcttagtcacagtgtgctctgtaaatacattagctcatcagacactgtttaccgtctacacatagcgaacatcagattctaatctcaagtaatgagtgcgttgtttacttacgctcgcagcttcatatcctcgaactgattcaaacgccgaatttgct

SEQ ID NO: 7012 - DNA, 322 bp, Triticum aestivum
  Clone ID: LIB104-014-Q1-E1-E6
agacgggacatcctccgcctctagtcatgtgagtatcactatttcctgagctgctcgagtgagattttacattctgttcgtggatttatatcgtagtctgttcttcatacctagaatccacgagaataccaatcaaaagatgttacggttagttcatcccatccgaatcaatctgagccttgcataaacttttctgtaatagccttgttgatcttgcggttgcatctacgtgttcaattgctggtcataacgtctagtcctctaaaattgctacttctgttcacatcttgtcacaccgtaactgcaccaacatcatctcacc

SEQ ID NO: 7013 - DNA, 327 bp, Triticum aestivum
  Clone ID: LIB104-014-Q1-E1-F10
ggtcgacgggaaaaagtagtgctagggtttgagcgagatggcgaggtggaagaggagataatgaccaggtggggagaggtatttataaggagcgcggtgtagtgtaattacgcaggtgcccctagcggttcacatctggatgacatgtggaaagcatgcaacttactgaaaattgagccaatttccccccggccccctgtttggttggaaggtctttccggcttcatcggttttcaggaaaaagggataataccattaaaattggttttaatggtgtacccctaaatcttcacctaacagggacccattaaaaactttcaactggtt

SEQ ID NO: 7014 - DNA, 312 bp, Triticum aestivum
  Clone ID: LIB104-014-Q1-E1-F3
cgacaccgaagaggcgcagagcgaatgcaatggcgatggcgcggagcctgggcagctgtcctcgcacgccaaagtcgattccaagtgggtcaagaggatccttgcaaatcggcagtcggcacacccgtcacgcgtgcgcaagctgcagtacatctcggagcttgagcgcgcgtctcgtcgctcaacatggaggtgtccgcattgtacccgcgtgtggcattcctcgaccacgagcgctcactgctgaagccggggaacacccacctcagatagagcattgcggcgctcacgcgggacatgatcttcaaagat

SEQ ID NO: 7015 - DNA, 347 bp, Triticum aestivum
  Clone ID: LIB104-014-Q1-E1-F4
cgggatcatgataacgagaaatatatatataggataataaggtggtgtattgccgccatgtccgttgagctgatgtttgtttcagctagagaaatcgttacgcccgctcataatttttcgacgctatggaaaataataactactggtatatcactctatatcaaaccggcttgtgaaataaatggttgcgccccggttttttgtcgtcaaaaaaaaaaacaaataaaatggaaatatacttttgcgatcaagtagatcaaaacttaagtagccgttggtgcaatctcatagatcctgaatcgatgtcgccacaatatgttatacaggacgcagtttgaaaccttcat

SEQ ID NO: 7016 - DNA, 297 bp, Triticum aestivum
  Clone ID: LIB104-014-Q1-E1-F5
aattcgccagtcgacggggataccgaactggacgtgaagacggacattgcttgtttatttgctgaatttggttcacttttggataagccatacatcagggaatcattcagcatgaataccattgataagggcgggagtttacctggcaccgcacagttgccgtgtcaggcggcgctccatgggcgcgcctcaaccgctagtattacaccacatgtggttgcatgttctctttcacacacattatgtggtaccagagcacaaaaactcaaaggtaacactatggaacaaacaactcaa

SEQ ID NO: 7017 - DNA, 421 bp, Triticum aestivum
  Clone ID: LIB104-014-Q1-E1-F7
gtacgatccagaattcgccggtcgacggggatggacatagagcttatcacacccgatcatcacttggtgtctgggcacgacgaactttggcaacggtgcatactcggggagaacaattttatcttgaaatttagtgagagatcatcttataatgctaccgtcaatcaaaagcaaaataagatgcacgtacgctactgtgaggtgttgtccttctcttcccgccctcctctttggtgtcctgcttaattcccctacacgtatgctactctaccccaacacgttggacgacaagggcatctccaccatatgatccatccatcctccgtgcatgttgcctgcgccatgcatgcgttgagctacgacgaactacccttctctacgtacccttctgtatgtgtatgtgtgtaacagtatggttgtg

SEQ ID NO: 7018 - DNA, 330 bp, Triticum aestivum
  Clone ID: LIB104-014-Q1-E1-F8
tgtctggcaggatattgacatgtgttgtgcgcggtgggcatattttcatcagggtgtcgtgtctcggagaatctggggatcctgaaatgaaattggagatgaggcgctaccgggagcctcggttctacaccaaggtgtatacaggttgccaatcgtaaggtcatgatgggaactcctttgagctttctctggtatcttccagatgcattggagcttatgtgaattgcatgacgagccattgccacatatgttggctgtgggacaaggttatatgcacagtagatacaggctttcatgagattcctgaacattgtgcattacagatccact

SEQ ID NO: 7019 - DNA, 232 bp, Triticum aestivum
  Clone ID: LIB104-014-Q1-E1-F9
attcgccgtcgacgggcaatgatactcctgacctggcagtccttcaccaatgccatcgtagcacaatccaatgccttgtcccgccacccgtctcccctccttgttactctccgggccacctatgtgcacccagattttccttttctttctagcttcccggggtcttttgtgtctcccccggtggcggcttggccgtcgcacctcgacgacattagccactgtgggatgaatc

SEQ ID NO: 7020 - DNA, 332 bp, Triticum aestivum
  unsure at all n locations
  Clone ID: LIB104-014-Q1-E1-H10
gggtcgacgggggtggtcactatggtgcacggaatcggggcggtggcccctcttattcgacaacggtggactccatggttgtgtgggagattcgaagtctggatctcgaggtggtgatggcctttctgaggtangccgcggtatgggacatcccatccatcgatatatcaggttcaatgcggctcaataggtgacacatgcgtctctttcggagtcgtcaggcacttcctgtcgccgacaggtgaagcctcaggcggatgctacgcacgacgtctcatgcggaggcatcaagtcatgcctgctnacagcgcgtgctgcatggtgtttgtgat

SEQ ID NO: 7021 - DNA, 408 bp, Triticum aestivum
  Clone ID: LIB104-014-Q1-E1-H11
gacattcttgatcatcgtgattcttacaaactcttatatgttctcttctccgaggtgacaatttgtttcacacgccgctcgaggcagcacatttctagaaactatatagatatatatttgattttgatttctacagaaattttcttgtaaattagactgagataaaatcatttgtttgcatttcgtcgagaatatagttttctccttttcccattttttatttttaaggcagactctcggccgacgacgtctcctagtctgcatcgatgattttttggctagtacttctacaaatcctatgtttcaaaaagtttgctttgccaagaggaagtcacggatacgacattgagctatgctcatgacgtgttgccgctggatgtaagacgaacaatacttcgacaccgccca

SEQ ID NO: 7022 - DNA, 383 bp, Triticum aestivum
  Clone ID: LIB104-014-Q1-E1-H12
ggatccggatgacggatgcgatcgaggaggcgaagctgagctcgttccagcaggagatcgtgcagctggcggcggtgctgaacggcgaccaccagctaagcagcctgcaggagaggatcagggagaggatgaacgtgagggaaggcacctcctacatgaggagcgccgtgcggcgcttcttcgaggccggcatgtcggccaagaggatgggcctcgccgacgacgaccagatcgtcaagatgaggccctcccttaccaccagaatgacctcctcccctgcagatcaagatgatagtccgtagagagcaacgatgcatacatacataggatgaagattgatgttggaattaccaaaatcttagtactacacatacatacataga

SEQ ID NO: 7023 - DNA, 326 bp, Triticum aestivum
  Clone ID: LIB104-014-Q1-E1-H2
gctgcagatagacgacataagtccactgggagcaactagattcacgatatcttcgatgccaccgattccgacaataagctcaacctgcacgacgaggatgaggctgaagacgtgtcctagggcccccacttggggtttgtcaatccctacagcaagatgatgattcctgctctcacataaagtcctatcgcgatccctccctttgctctggttgctgcgaatatcagcctggccgggagcatcatccgcagcatgagggtcactcatgacattctccacttctgttccggccatgttgtgacagcggacatccacgttattgacgt

SEQ ID NO: 7024 - DNA, 410 bp, Triticum aestivum
  Clone ID: LIB104-014-Q1-E1-H4
acgggacagtggtgaggtaatatgcttcacacaaaccggagcttctcacaacaagcatgatggttttcggtagggaacgtcccacctttgaggacgaaacgatatccattacctcttattgctctcaaattttttctcgtgtcaacattgaacaacatgagtgttgtgtgattttttatgatttttcggggtttgtttggacatttttatgcattaagtgagttttcaatgcatttatgtgcataattcaaatttgaactacatgcgcatgctccagtgcatataaattcattgaaaaatcaaatctttgtccttgggtgcatgcttaagtcccatgcaagaaatgggaatgaatttcaaacaccatggcaccgttgattgccggcaaaacagtgaaatgcctggttttt

SEQ ID NO: 7025 - DNA, 392 bp, Triticum aestivum
  Clone ID: LIB104-014-Q1-E1-H8
gaatacctgcagcacgagaatttcatggaatgagcagtcagttagtcaaggcaatgccgagtcttatttttacaaaagtccaggaagacaattgtacttcgtcaacatgtgccatttgcttggaagactacagtgttggtgaaaagataagggtgctgccttgtcgtcacaagttccatgctgcttgcgtggacctgtggctcacatcatggaggacattctgccctgtatgcaagcgagatgcaaatgctggaatgtcaaatttccctccatcagagtctacccctttgctttcttctgctattcccttgccagctgaatcgacagctttgtcttcttttcgttcaatggtagcagcatctcctccaaggacaataagccggcatccttca

SEQ ID NO: 7026 - DNA, 428 bp, Triticum aestivum
  Clone ID: LIB104-015-Q1-E1-A2
ccgggtcgacgggatgcaggagttcctcgtcgaattccgcgggccccaagaaagtctctaccagggaggtgtatggaaggttcgggtagaactgcccgatgcgtatccttacaggtccccctcgattggtttcgttaataagatatatcacccgaatgtcgatgaactgtctggctccgtctgtttggatgtcattaaccagacatggagcccaatgtttgatcttgtcaatgtgttcgaagtcttccttccacaacttctattatatccaaatccttctgatccattgaacggagaagctgctgcactcttgatgcgtgatcgccctgcttatgagcaaaaagtgaaagaattctgcgagaaatatgccaagccagaggatgcgggtataaccccagaagataattcgagcgacgaagagctgagcg

SEQ ID NO: 7027 - DNA, 435 bp, Triticum aestivum
  unsure at all n locations
  Clone ID: LIB104-015-Q1-E1-A3
cgggtcgacgggggcgaggaagccgcgcagcagagagcgtcgtcttcggaagaacagcagcaggaaaagataaatgaggtgcggggtctcctcgacagtctgacggaggagatgccgagttttctgtcggacgccaccatccggcgtttcctccgggcgaggagctggagcacggagcaggcaaccaagtctctcaaggagactgtcaagtggaggcgtcagtacaggccggatgcaatttcctgggacgacattccagaaacggagaacgaggcccggaggacacatgtggccgactaccttgacaagaacggaagaagtgtcctcgtagcaaacgtgccaatgaagtctaaagtttcagcanaggagcagatanagcacctggtatatctcctggagtatctcgccacaaactcagcggatgaacaagacgac

SEQ ID NO: 7028 - DNA, 311 bp, Triticum aestivum
  Clone ID: LIB104-015-Q1-E1-A4
gggcgagaaacagcgcagcagagagcgtcgtcttcgggagaacagcagcaggaagagataaatgaggtgcggggtctcctcgacagtctgacggaggagatgccgagttttctgtcggacgccaccatccggcgtttcctccgggcgaggagctggagcacggagcaagcaaccaagtctctcaaggagactgtcaagtggaggcgtcagtacaggccggatgcaatttcctgggacgacattccagaaactgggagcgaggcccggaggacacatgtgggcgactacgatgacaagaacgggagagggtg

SEQ ID NO: 7029 - DNA, 425 bp, Triticum aestivum
  Clone ID: LIB104-015-Q1-E1-A5
acgggcacacactccacgtctactagcataacatggcataataagcaaacgcggaagtaactcccaaaggtttgaaagtaaacaggtaataggtactacctcaactacttcccatcccacaaattaattagaatcctaatcatgcaatgtgtgaggatttgatctaatgcaataaaactgggtagtagaaaaggtatgatcaaagtgttacctgccttgctgatgatccgggaaacctagcgattcgaagtaacaagcggcgcacttcgggtattctatcgcagacaaacaaacaagcatacaataagtactcatctaatgcacgggttaaactcaaatgagaggatctaaacagaaggttcaacttaagaactccggttggcaaaaagaatcagaacgaatggaacaacgagagtcaaacggcg

SEQ ID NO: 7030 - DNA, 381 bp, Triticum aestivum
  Clone ID: LIB104-015-Q1-E1-A6
gacggggaagaaaacgaagaagaagacgaagaagacgaagaagacgaagaagaagaagaagaagaagaagaagaagaagaagaagaagaagaagaagaagaagaagaagaagaagaagaagaagaagaagaagaagaagaagaagaagaagaagaagaagaagaagaagaagaagaagaagaagaagaagaagaggaagaagaagaagaagaagaagaagaagaagaagaagaagaagaagaagaagaagaagaagaagaagaagaagaagaagaagaagaagaagaagaagaagaagaagaagaagaagaagaagaagaagatgaagaagaagaagaagaagaagaggaagaagaagatgaagaagaagaagatgatgat

SEQ ID NO: 7031 - DNA, 147 bp, Triticum aestivum
  unsure at all n locations
  Clone ID: LIB104-015-Q1-E1-A9
gacanacacatgtcagggtgaaatgaaaacacagccgacagatacagaaagaactgcataaattaagtattcacttgatatcatcgatgaacaaaanattaaactctaatggttgccccaaagtttaagcatctgaaagaggatagt

SEQ ID NO: 7032 - DNA, 343 bp, Triticum aestivum
  Clone ID: LIB104-015-Q1-E1-B1
cgggccgaccgggtgcagcacacaagctattatgggctctagcatagttgagtaggttacatgatctcttgaagaggtgggctagcagatgtaggggaaagtaggtgtaccggtccatccagagtaaagagtgattgttcctgaaagactgtgtctcggtcatccgtttctcaaacatcatgcagtgcgagaatcaagcggaggcgatcgagtcttgtggggagaaatgcgcaaacctctacagagtgtacaaactaatcatggttagccgtgtccccggttatggacaacttgagtatctagtacctggattatcatttgaatctcatcaccatgttacttt

SEQ ID NO: 7033 - DNA, 445 bp, Triticum aestivum
  unsure at all n locations
  Clone ID: LIB104-015-Q1-E1-B10
cggtcaagaatacccgggccgacggggaggttgagaagctgattggcaggatagtgaagtggctgaagcccggtgggcatattttcatcagggagtcctgcttccaccagtctggggattccaagaggaaagtgaacccgacgcactaccgggagccaaggttttacaccaaggtgtttaaggaatgccactcctatgaccaagatgggaattcctttgagctttctctggtaacttccaagtgcattggagcttatgtgaagagcaagaagaaccagaaccagatatgttggctatgggagaaggtcaagtgcacagaagacaaaggctttcagagattcctggacaatgtgcagtacaaatccacgggaatcctgcgttaagaccgcttgtttggggagggttatgtcagcaccggtggattcgagaccacanaagaatttgt

SEQ ID NO: 7034 - DNA, 182 bp, Triticum aestivum
  Clone ID: LIB104-015-Q1-E1-B2
cggtcaagcaaaccgggtcggacggcaatggaagatataggtgtgatatgtcaagtagtggacagataagccaaccactggatgtggttttcagggatttttgcagtgggatttgtagggtactatgctgcgctgtgtttggaatttgaaataaaacgatgggagatgtgccacgctcataa

SEQ ID NO: 7035 - DNA, 214 bp, Triticum aestivum
  Clone ID: LIB104-015-Q1-E1-B3
gggccgacggggttcacaagtggcggtccgtaaaagacaacgtttcaatttgcgtacaaggcgttcaaagttccctggcctcatgttatgaagcgcacaagctcagaaattccactgaatgatttccagtttacaatgaactggtaacgagttgcttggtgttacagataggctactggacagacgacaacattttgtggaacttcatcgtgac

SEQ ID NO: 7036 - DNA, 419 bp, Triticum aestivum
  unsure at all n locations
  Clone ID: LIB104-015-Q1-E1-B4
ccggtctagnaaatccgggccgacggggatgaggatggtgacttcgcggagggcgaagaggaaatctcggaaggagaggagtatgacaaccccaaggccagtgacgccaagaagaaacaaataggcgagggtgaggagaatggcgaggatgatgaggaagaacaagaggagcaggagggtggaggaggtgacgacgatgatgatgacgacgacaacgacgatgacaatgaggacgacgacgatgatgacgatgatgtcgctgctgaagacgatggagatggagtagaagaggaggatgatgacgatgaggaggaggaggacgatgaagacttgctccagcccccgaagaagaggaagaagtgaagcccttcgacgcggctgctttagtcaacatgccacgagatgtgcctgtccttcac

SEQ ID NO: 7037 - DNA, 293 bp, Triticum aestivum
  Clone ID: LIB104-015-Q1-E1-B8
cgggtccatggagttggtgggttcggtaaagtttaccagggagagatcgatgggggcacaactaaggtggctatcaagcgtggcaaccccttgtctgagcagggcatacatgagttccagactgaaattgaaatgctgtcaaagctccgccaccgccatcttgtgtcgctgattggttactgcgaggacaagaatgagatgatcctggtctatgaccacatggcccatggaactctgcgtgagcacctatacaagacccagaatgcgccgcttagctggaggcagcgtttgga

SEQ ID NO: 7038 - DNA, 321 bp, Triticum aestivum
  Clone ID: LIB104-015-Q1-E1-C10
ggccatacagcgagctcgaggggatggggttcaaccgtgagcttgtgttggaggtcttctttgcatgcaacagggatgaagaactggctgccaattatcttttggatcatggccatgagtttgaggaacaacaatagatgttagattggtcttgctgttgaaagacagaagagtcagtgacagaagcatttcagtttggtgtcgttcttatatcttgctgctgaatatcactgctacttgccattagtgccttgttgctgactttcaatttcttgtatcctggaaatgctttctaagtacataatatcatatgcaaacctt

SEQ ID NO: 7039 - DNA, 117 bp, Triticum aestivum
  Clone ID: LIB104-015-Q1-E1-C2
cggtccagaaatccgggtcgacgggggcggttgtgccgacgcacgctccgagagcgacgaggagagcggcgaggaggtggacgaggcatgcgccgatgcggccatcctgctgaccaa

SEQ ID NO: 7040 - DNA, 379 bp, Triticum aestivum
  unsure at all n locations
  Clone ID: LIB104-015-Q1-E1-C9
gggtcgacggggagcacaaggagggcatgatggagaagatcaangacaagatcagcggcgacggccacggcgacggcaagaaggacggcgagcacaaggagaagaaggacaagaagaagaagaaggacaagaagcacggcgagggccacaaggacgacgacggccacggcagcagcagcagcgacagcgacagcgactgagccagctccggccgcgtgcagtgcangggagatgaacgcgtgggttaatttggagcgtgtggtagcatatgtatgtaatgcttgacatgtctcatggatcttgtaatgtaataaccggcttcactgcaaggtgccttttaataataactttaaggaatttccattggtaatttggtacc

SEQ ID NO: 7041 - DNA, 258 bp, Triticum aestivum
  Clone ID: LIB104-015-Q1-E1-D12
cggggccatgtacgagagcatgctcactggaaacgtgtctagatcgaagatggaggtagtaaaccccccaccggtttatttcactttgtgagactgggaggggctggaagctttttatttccaaaaaaaaaaaaaaaaaaaaaaaaaaaaaaaaaaaaaaaaaaaaaaaaaaaaaaaaaaaaaaaaaaaaaaaaaaaaaaaaaaaaaaaaacccaaaaaaaaaaaaaaaaaaaaaaaaaaaaaaggggcccccaaaaa

SEQ ID NO: 7042 - DNA, 371 bp, Triticum aestivum
  Clone ID: LIB104-015-Q1-E1-D2
cggtcaagatatcccgggtcgacgggcgggatcatgatcacgagaaatatatatataggataataaggtggtgtattgccgccatgtccgttgagctgatgtttgtttcagctagagaaatcgttacgcccgctcataatttttcgacgctatggaaaataataactactggtatatcactctatatcaaaccggcttgtgaaataaatggttgcgccccggttttttgtcgtcaaaaaaaaatgaaatgtaagcaaaatcaataataaaaaaataggaaaaatgtttaaaaaaatatatgttgcaaggtttagaaacttgtggtagcatctgtacgtaatgctttacatttcccatgggttttgtgaagt

SEQ ID NO: 7043 - DNA, 342 bp, Triticum aestivum
  Clone ID: LIB104-015-Q1-E1-D4
cggtccagctatcccgggccgacggggaccacaaggagaagaaggacaagaagaagaagaaggacaagaagcacggcgagggccacaaggacgacgacgaccaccacaacaccatcagcgcatcccattagcattctaccattttcctcggagagaagtagccagaaacagcagcgccatggccggcatcatgcacaagatcgaggagaagctccacatgggtggcggcagcgacgagcacaagaaggacgaggagcacaataaggcggaggagcacaagaagaaggacggggagcacaagaaggacggcgagcacaacgagggcatgatggtgaagatcaa

SEQ ID NO: 7044 - DNA, 406 bp, Triticum aestivum
  Clone ID: LIB104-015-Q1-E1-E3
ggtccagatatcccgggtcgacgggaggcacaccacgttgagcgcgttgagctcgatcttgacgtcgtagcagaagcgcgccgccagctcgaaggccttggcgccgcccgggatgtcgtccagctgcagcgtgcacatgccgccgccgtccgacggcggccggtactcgctgatcagacgctgcagcacgccgctccggctcaacagcgggaactgcatgctcataatgacgatcgatgcaccgttagttagtcacattaacgcgcgcaatcgatcggtttgtgcagttcagttggtgaatgcgaaatgtgacggcgacacactcgatcgtgctaaccttgtggagataaaaggacatgtctcctacttccacgacgacatcgctctcgagctcggtcatgcatct

SEQ ID NO: 7045 - DNA, 333 bp, Triticum aestivum
  unsure at all n locations
  Clone ID: LIB104-015-Q1-E1-E9
gggtcgacgggtatgttgacaatgaaagtatgccgctcanaatattatttatctctgctttaaaaccgagctttggcacctctacaaatccctgcttcnctctgcgaagggcctatctatttactttcatgttgagtcatcaccctcttattaaaagcactagctggagagcgctgctgtcatttgcatccattactattaatttatattgggtatgactatgactggatctcttttaccatgaattacaatgtctagtcagtccttgatctttaaaggtgctctgcatttatgttttgcggtctcagaaagggctancgagataccactttg

SEQ ID NO: 7046 - DNA, 435 bp, Triticum aestivum
  Clone ID: LIB104-015-Q1-E1-F1
acggtcaaggaattccgggtcgacggggttcaccaggtgcggatccgtataagataacatttcagattggacacgagaagttccatgttccttggctttatgttattaatcgcaaaagctctgaagttccattgactgatttccatttaagatacactggaaacgatttgcttggtgttacggctaaagtagtggacatgcctcagcattttgtggaacttcatcctgatatagagaagattttctgggatccacagaattggcctaaatatgtacttgtaagttatacatgggaggaacaatcagagatagatgttactgcaggattctatgtgttatttggatctggccttgttctttccttcatccttgcaatctatgtattgcaatcatcgcaggataaattaacaaggtttgtacgagaagcggtttctg

SEQ ID NO: 7047 - DNA, 439 bp, Triticum aestivum
  Clone ID: LIB104-015-Q1-E1-F11
cgggtcgacgcggatattaatcaagcatttgaaaaatattaaatgtgcatagaaaaatgttgacgatgtattagaaaatattattctattatttgaaaatctttttgaagcatttgaaagaatttaaagtgtgtatagaaaaaatgttgaccatgtattcaagaaatgctgaccatgtatgtgaattgttttaatcatgtatttgaaaaatgtatatcaagaatatgaaatatgtttaagtatgtatagagaaactgttgaccatttatgaaaaaaaaaatgttaaactcgtattggaaaaaggaaaaagaaaccaaagaaaaaaaaaaaggaattgagaaaagaaaaaatgggttaaaacccatgaaaggaacaaaaagaaaccaaaaggaggacgaaagaagagacaaaaagatgtataatgaaaaaaataaaacca

SEQ ID NO: 7048 - DNA, 391 bp, Triticum aestivum
  Clone ID: LIB104-015-Q1-E1-F6
acgggtcaatgaagttggtgggttcggtaaagtttaccaggggagagatcgatgggggcacaactaaggtggctatcacgcgtggcaaccccttgtctgagcaaggcatacatgagttccagactgaaattgaaatgctgtcaaagctccgccaccgccatcttgtgtcgctgattggttactgcgaggacaagaatgagatgatcctggtctatgaccacatggcccatggaactctgcgtgagcacctatactagacccagaatgcaccgcttaactggacgcaacgtttggagatctgcatctgtgcagcccgtgggctgcactaccttcacaccggtgcaaaagcacaccattatccaccgtgatgttaaaacaacagtcatcctcc

SEQ ID NO: 7049 - DNA, 418 bp, Triticum aestivum
  Clone ID: LIB104-015-Q1-E1-F8
gggccgacggggaagacacggcattggaagcccgcgcggagaggagtacgagggttcactggttcggctgcggtgtgaggctgccgtcgccgcagggcctggccagcggtgggaatagtaggggcggtgaggcctccgcggcagcacagccggccatgggaggcaggagcatgcgacacgaccggcgctgctttgggtggctggagcaagaagaccagaggttgaagaagcactacggccgttggatggacatcgtacggtcactggagctagaatcattcatattgactaagttgataaagcccttcatccccatcaacttagtaggcccactagtcagcctcccaccaaggtgggtcccagctagccgggggagtattcatttttttgtgcgtaataaggaggcacttccgatggg

SEQ ID NO: 7050 - DNA, 286 bp, Triticum aestivum
  Clone ID: LIB104-015-Q1-E1-G1
cggtctggaaatccgggtcgacggggaagataggattaggaaggttcaggagctgaaggcgaaagcaaaggcggctttggagaacggcgggtcgtcgtgcatgaatctggacaagctggtccaatccgtcgtctgaaaattagcgcggcatgtcggccctgaataaattctgctgctttcgctcattgatgagcagattggggttgtttcttgcttgcttggaagatcgggattgagtgaaaagcatatcctatgttgtaagttgcaactgtatctcatgccaaaa

SEQ ID NO: 7051 - DNA, 307 bp, Triticum aestivum
  Clone ID: LIB104-015-Q1-E1-G10
atatcttcctcaaaacagccaccatacctacctatcatggcatttccatagccattccgagatacattgccatgcaacttccaccatcaccatatacatgacttgagcattcattgtcatattgctttgcatgatcgtaagatagctagcatgatattctcatggcttgtcatttttttatgtcattgctacgctagatcattgcacatcctggtacaccgccggaggcattcatatagagtcatatctttgttctagtatcgagttgtagtattgagttgtaagtaaataaaagtgtgacgatcat

SEQ ID NO: 7052 - DNA, 431 bp, Triticum aestivum
  Clone ID: LIB104-015-Q1-E1-G11
gggccgacgggccctttgatgtacccgcaataaattagtcgtcgaacgagtgattccgtcccgtgtggctgatgtgatctacaaaatgtgtggcttcttgcagctctggagaccgcttagtaagcggagcgatcaaggcatcatcgacaacatcatgcgggtcttcgtgcctcggctgcgtcttttgctcctcccccgccccctcctgagccagattagcgtctcctagtagtcttatttggggcttgtcttgctgtgccccagcatgattctatgacttattgtacttgtaacttgatgttggatgcttggtgttggatgcttggtggtatgctttataatattaaaccgggggaaacccttttccgtcattttttggggtcaatgtcgagagagtgaagtcatcaccatcgccagagctaaagtcgtgg

SEQ ID NO: 7053 - DNA, 171 bp, Triticum aestivum
  Clone ID: LIB104-015-Q1-E1-G3
gggccgaccggatgctgattgaagagttactaaatctttcgagaggcctgtaccgatcagacctcacacagtctgatctctgtgcatcagtgtcatccctgaatcagtcacgctgagatgcacagtacgtgaatgatttataacacagtagcaatcgtccacgtattacat

SEQ ID NO: 7054 - DNA, 232 bp, Triticum aestivum
  Clone ID: LIB104-015-Q1-E1-G8
cgggtcgacgggggagctaactgggacgagcgacagtcttttcctacgagtctatccccctacgagcatgcgcgtagtgctttggtttttgatgacttctaaatttttccaacaagtatatgagttcgtttgacgaatgttgagtccatggattatacgcaccctttcacccctccagtattgctagcctcgcgtgtagcgtgcaactttcgccggtgccatgcagccacca

SEQ ID NO: 7055 - DNA, 441 bp, Triticum aestivum
  Clone ID: LIB104-015-Q1-E1-H1
cggtctagtaatccgggtcgacgggctttggagatgcccatcaatagatatcaatgtgagtgagtagggattgccatgcaacggatgcactagagctataagtctatgaaagctcaaaaagaaactaagtgggtgtgcatccaactcgcttgctcacgaagaccaagggaaatttgaggaagcccatcattgggatatacaagccaagttctataatgaaaaagtcccactagtatatggaagtgacaacataggagactctctatcatgaagatcatggtgctactttgaagcacaagtgtggtaaaaggatagtaacattgccccttctctcttttctcttatttctttagtttgggccttctctcgctttttttggcctcttttttcgtcgggagtctcatctcgacttgtgggggaatcatggtctccatcatcttt

SEQ ID NO: 7056 - DNA, 450 bp, Triticum aestivum
  Clone ID: LIB104-015-Q1-E1-H11
cggtcaagaatatccgggtcgacggggtcacattgcttgtgaggcttatagtgatgtgcattaccgagagggcccagagatacctctctgatacacggagtgaaaaatcctaatcttgatctatgccaactcccaaacaccttcggagacacctgtagagcatctttataatctcccaattacgttgtgacgtttgatagcacacaaggtgttcctccggtattcgggagttgcataatctcatagtcaaaggaatatgtataagtcatgaagaaagcaatagcaataaaactaacaatcataatgctaagctaatggatgggtcttgtccatcacatcattctctaatgatgtgattctggttatcaaatgaccaacacatgtctatggtaaggaaacttaaccacctttgattaacgagctagtcaagtagaggcatacgagggacac

SEQ ID NO: 7057 - DNA, 421 bp, Triticum aestivum
  unsure at all n locations
  Clone ID: LIB104-015-Q1-E1-H2
gggccgaccggggagctcactaaggtctcgatggacctcaccatgctccactaccccttgtgactctgccccttgacgcctccagtgtatgaggttcgaatacacctcgtccattcggccgattgagcaaggtgcaggtttcttgattgatgtgttgttcgattgatttctgcagtgcaagggagggcacctggcctgcgtggactgccacgtcgagcgcctcgagaaccagcggcagtgccagaagtgcgagcacgatggtggcttcgacatgcggaacacgacggtggatgccatcatttcgtcgctgaaggtggagtgcccgcacgaaggttgtgggctctgcatcacttaccacaagctcgccgatcaccagagcatgtgtctgctcgcgccctgcanatgccccgtgcctgtctgc

SEQ ID NO: 7058 - DNA, 229 bp, Triticum aestivum
  Clone ID: LIB104-015-Q1-E1-H3
ccgggtcgaccgggatccgcaacaaagtcgcgatcgacgaggccatgctgcactcgccccaggaagacatcgcggagatggctccagtgctgtacgcttcgtaccacctcctcaacctgtagaggatggccacggcgcacgtttcttggttgatgtgttcttcacatgatttctgccctgcaagggatggcacctctgctgtcttcaatggcatgtctaactcctgcac

SEQ ID NO: 7059 - DNA, 360 bp, Triticum aestivum
  Clone ID: LIB104-016-Q1-E1-A10
ggggacgctgcgaatgttcgacagaaggaccaacgtgatctggctaggtcgatgtcatggtagctgtctgctcggcatctgcatggctgtgagcatgccgtcccatcgaacatggtggtgcccaagggctcgggtacgcgccttcgcgttctgcgcactgcacccacggcgccacgatctacaccattgtcgtcgctgccaccgtcattgtacaccaccacagagtacagtcctgagaaggttctgcagtcaaagcgcttacgctcaggacgagcacatacgaacgccgtccatgaactgtgcagatgcaacaggttccgagctgtatcgaaacacgtcatgacatgaagacagcagtca

SEQ ID NO: 7060 - DNA, 469 bp, Triticum aestivum
  Clone ID: LIB104-016-Q1-E1-A11
ggccatgcttgaaagatgacgaactgggttttagttgagttttattgtattttagaacctcggtgatgatggtgatgaaaatttgtaagagcagaacagaataaaaatgttttaggtgtttatcaacggctctgcagaatgcacgagttgcttgtcgaggttaaggcaccgctagataagtgcaacacataataatatcaagtatgtcatgatcttggagataagtgcaacataaaaatgtcaagtatatcatgaccttggagataagtgcaacataaaaatgtcaagtatgtcctgatctttccaggcagaattgctgggatttggttaactgcacaaacattcttgatcagcgcttgatcactagatttatacttaagcacttgataacaaggcactcattggttgtgtgaaaacatatacagctaaagaagaatattattattgacaatctaggtttaacaaccac

SEQ ID NO: 7061 - DNA, 468 bp, Triticum aestivum
  unsure at all n locations
  Clone ID: LIB104-016-Q1-E1-A2
tcgccgggaacacgattccggtggaggagattctgacgatcgacgtgaagccggggtggaagaagggcacgaagatcaccttcccggagaagggcaacgagcagccccacacgattgcggcggacctcgtcttcatcatcgacgagaagccgcacgcggtgtacacccgggacggcaacgacctggtggcgacgcagaagataccgctggcggaagccctgacaggctacacggtgcacctgacgacgctggatgggcgcagcctgacggtgcccatcagctcggtgatccacccggggtacgaggaggtggtgcgcggcgagggcatgccgcttcccaaggacccatccaggaagggcaacctgcgggtcaagttcgacatcaagttccccgccaggctcaccgccgaccagaagtccggcgtcaagaggctcctgnggcagtanagcaggtctgtgtgtgttgttg

SEQ ID NO: 7062 - DNA, 461 bp, Triticum aestivum
  Clone ID: LIB104-016-Q1-E1-A3
ggggatcatctatacgacaaagtgttctggcacaaaggaggtcaaatcttgatgcaaatcagttccaaatcacaaagcaggctgcaaacaaggctgctactatgcctgtgcgcggtagggctgacagatggaacaaaccaagtggcccgtctacctcagcacagaggaggcccgtaagcgaggctcttcagaacagcaagggtaaggagatgcagaatgagcctccaaggacaatggatgcgctctttgcacagatgaagcagcaacggatgagggtcatgccaccgcagcaaccaaaagctcctaccaatggccatcagtttaaccagcagcggcgtggtcagcagcagcggcgaggcagagggggatatggtgtccgcagcggtggtggtaaccgttgagcatggcacccatatagaacattatcactggtgttcctcggaaaggagaagcctcacccc

SEQ ID NO: 7063 - DNA, 462 bp, Triticum aestivum
  Clone ID: LIB104-016-Q1-E1-A5
ccgggtggccggggttgttagaaaaggagtgacacctgccgagaagcttctgaatctatacgagacgaagtggcagcgcagcgtggaccctgtgttcgaggagttgttatattgatatatactgatatcatatataacttcggtggacgctggacaaggtggacagggtcttcagattgtatccccatacaaaatcccgtccccaattctacaagccacctgaccagggaaacctactctccggtctcgtggctgcgaataattttgagctcggaacactctgtttgtggcttgccgcctttcttttttcggctgtgtggaccttttacagcttctgatttttctcgcatctccagggagccggaacaaacacctgtttgtaccgatccccttttcatcttttcctgatgaactgcttgtattcggaataaatccacctcgtgtgatgatggaaggaacctg

SEQ ID NO: 7064 - DNA, 461 bp, Triticum aestivum
  unsure at all n locations
  Clone ID: LIB104-016-Q1-E1-A6
tccgaaattcncggggcgccgggaaggtcactcagaatatggccctcaagctaaggaacaccgacactggcgagctcatcatgcacctggagtgggttaacctccccccaggcatgtcgcggtgatttgatttgatttgcaaagggaggccagctattgccttccttttgtgatcgtaatgttgcttcctctatatatgagctatgagaataattaagcgatgtctatcccattctttacataacacccactgtaatgatttgtggatctcacaccaggatggtgcgtctataatatgagcaacgtcttggtgagacccacacatcatcacattggttgctacgtaaggcatgtgatagacttatgctactgggggtaatgcttgttttcagttttggttctgcatatgttgtatggctattttaattaaaaaaaggtatattttgtcccaaaacaaaaac

SEQ ID NO: 7065 - DNA, 432 bp, Triticum aestivum
  Clone ID: LIB104-016-Q1-E1-A8
gggactgcttgagacttttcatccttcacgtggtctcaggcaaggggatccgctatcaccatacttattcctctttgtggccaaagctttgccgttgttacttaatgatgcttcggaaatgggggttatcctagatttccggctaaacagacatgctccaggtatatctcatctaatttttgctgactgatagactcctatttttctaaaggtaacttacagcatgctctaaatgttaaaggtattttgtcggcatatgacgatggaattggacaactattatgtccggataaatgtaccatcttaattggcaaaaaatgttcaaaggaggaccagttgtccatcctgattatccttaaaatcacgatcgatggttttgacgataaatatctgagcttgcctgcaccatcacttttgaaagctttatcttct

SEQ ID NO: 7066 - DNA, 463 bp, Triticum aestivum
  Clone ID: LIB104-016-Q1-E1-B1
tcgacggggatcaaattttcaacgtaaataataagattgtttccaaagaactatctgttggtagagctgccttgtcaagtctacttggcggtattggctacttctacgggcagtcaaaaattgcacttcccaaaggtttttcacaaaaaaatggagataaatatattccatattggcctgctgcactatatacagctgtgcccagtcgctcatttttccctaggggattcctgtgggacgagggcttccatcagttagtcatttggcgctgggatgcccatatatccatggacataattggccattggttggatctaattaatgcggatggatggattcctcgagagcaaatattaggggctgaagctttaagtaaagttcctgaggaattcgttctgcagtatccttccaatggaaaccctccgacattatttcttgcgctgcgtgacttggcaagtggcat

SEQ ID NO: 7067 - DNA, 476 bp, Triticum aestivum
  Clone ID: LIB104-016-Q1-E1-B11
ggcgaggcgaagaggcggttccagcggatccaggaggcctactccgttttgtccgacaaggggaagagggccatgtacgacgccgggctctttgatcccctcgacgacgacgaccaggatttctcggacttcatgcaggagatgctggtgatgatggatagcgtgaaaaacgagaagccggacacgctcgaagacctgcagaagatgctggatgacatagtcaacggcgacggcggtagccgcgccactgctggtgctggtggtagcggcggcggtggtggtggctgcggtggtcgcgttccaccggaggccaaccgcagaactcgtgtcgccccttacccgcagccttcgcgaaggtgatggacgcgccggtgctcgtgacgtgcacgcaccgctgcgcttgtaggagagagatcagagcaagaagagagcaaccagcgtgaaaaaaaacattagcaaatcagaattgttgctcg

SEQ ID NO: 7068 - DNA, 440 bp, Triticum aestivum
  Clone ID: LIB104-016-Q1-E1-B2
ggggatccgtaaaaatcttcgaagtaaagtcacttaaatcattcagatgaggataccaccctatcataccacatcacacccattttaatagcatgttggcacacaaggtagaccattataactcagagctaatcaagcatggcacacgcaacgatgatctctaattgtcattgcaaacatgtttattcatgacaagctgaatcaagaacgatgaactcatcatatttacacaaacaaaagacgtcgagttcgtaccagcttttttcatcgcagtcagtccatcatatatcatcattattgcctttcacttgcacgaccgagcgatgtggataatcataatagtgcacgtgcattggactaatctggaatctgcaagcattcaattcaagggagaagacacggtaatatggactcttggttaaatctacaatcatgtatat

SEQ ID NO: 7069 - DNA, 454 bp, Triticum aestivum
  Clone ID: LIB104-016-Q1-E1-B3
gggatcatcttatggcctcgccggactcagagaggccctccgcgacgacactttacggtcgcccgcgtccggagcggaggagtccggaggaggcgtttcgctctccatcatctctggaagaagatcccccaaagacaagctcatttgagaggggctaaggcccgaactgcaaagatacatgcagcgattatcttctcagaagaaaagacgacatatctgtactattaaggtattttgggtcacttacgactcgtgggagaattgatccccccaaggactttgtgcggcaaccgcgccccccggggtaggaccctctgtgggagacttcttctcccgtttcgaagcttcggcttccgaatccccaaacgcaatccttttcctcttctggtcgtcttccttcatgaagacgctcactccctcggctggagcagccagcgtttggggcccgcgactg

SEQ ID NO: 7070 - DNA, 461 bp, Triticum aestivum
  Clone ID: LIB104-016-Q1-E1-B8
ccgggtgcccctccgcggacgaggtgcagcgcatgatggcggagatcgacaccgacggtgacggcttcatcgacttcagcgagttcatctccttctgcaacgccaaccccgggctcatgaaggacgtcgccaaggtcttctgaatcagttcatttcacctcagccgtccgatccaggagccgatccatctacgtacggcttcgtatatcaatttcatgcaactacctactccggtcccgatccagcctcagcttcacctgaggccggccctaattttgtttgatcatttttttgctaccagtagtaactagtgatgatcactgttccatcatttatttattttatatcatcacaagtttcttttctttctctacctttttgtcgatcgtcggctccagctcgatccaacgatccatgctgctaattgtttgtgtacgggtgatttaagtaacctgtgcact

SEQ ID NO: 7071 - DNA, 330 bp, Triticum aestivum
  Clone ID: LIB104-016-Q1-E1-B9
ggggacaccccggaggtgcaggggctaggccggctcctccttcatgcggtgactgatctagacgccgcggttgtgccgggtgaggccggctcctcaatcacaagacggattgaaaacttcaattgtgctttccaaaatgaatttaccccaaatttaccccaaaaattaccttaaataattttccacaatttttttccgtcacaaaagttaactcaacctttgtgcctaagttaatgaattggtggtgggtataataccattatatttacacaaaatatgtccccatatatagtataaaaccttctcttatatatctcaaacttatcacga

SEQ ID NO: 7072 - DNA, 453 bp, Triticum aestivum
  Clone ID: LIB104-016-Q1-E1-C1
ttccgggtcgacgggctgccggacaatgtgggcgccgcggcggaccgggtcgtcggcgaggagatcgaaggcagggggtggtctgagatgctgcggatggaggtggacgacatgaccaaggagatatgcggggatgtcctgggcgaggtcgttgaggaggcgctgtcagagctcgccgggtgccgttgatggatgctcctctttatttgtttgccctgctcgcggtggtgtccaccggtggcttttatttccgatctggtggagaccgtttgctgaggaccggcgcatcttggctccttgtgtgtgtgtgtgtgtatagtccctcttgactgtcctgtatgctccagtcaagtgtgcgtgcccactcccctctctctgtcgcgccacatgccgttacagttgatacattctattctacagtaataatgatcgtgaatgataccaagaaaaaga

SEQ ID NO: 7073 - DNA, 461 bp, Triticum aestivum
  Clone ID: LIB104-016-Q1-E1-C10
ggggggctcgatccactaacggtatcggttgcacgagtccacggacggctccacccatcgatgggtccacctttaagcaaccacccacatcgggtctacgcaagaagcaaccacccatatagggtcgacgaagtagcaaccttgtctatcccaccatggccatcgcccacaaaggacttgcctcactggcggtagatcttcacgaagtaggcgatctccttgcccttacaaactccttggttcaactccacaatcttgtcggaggctcccaagtgacacctagccaatctaggagacaccactctccaagaagtaacaaatggtgtgtaggtaatgaactccttgctcttgtgcttcaaatgatagtctccccaacactcaactctctctcataggatttggatctggtggaaagaagatttgagtggaaagcaacttggggaacgctatagattaagatt

SEQ ID NO: 7074 - DNA, 449 bp, Triticum aestivum
  Clone ID: LIB104-016-Q1-E1-C11
gacccagttatagccacgaccaaataacacgtagcactacggctatttaagccaccctctgcctctgccatccctcatccatctgcccttcttgctcttcgaccccttctccgtcttctgcatatccctcagccatgcagtacaccggaccaacctactgcttcccacccaccgtgccggagaggctctaccctaccggcgtgtacgttgatcgcatactatgtgtgtgggcgatatcaaggctgaggaccgcaaggaacttcgccgagttcttcctcgcgtccggctaccaccatctcccgaggggatctccaacgatgttccgcgtcgaggaggtcatccaaaaccgggtggtagttgctctccttgcccacttcaccaacacattcgacgccttctacctcctcggccgggtgttttggtgtggctccgagttcatcgctttcacc

SEQ ID NO: 7075 - DNA, 442 bp, Triticum aestivum
  unsure at all n locations
  Clone ID: LIB104-016-Q1-E1-C4
ggtcgccggggaagcggtcgatcgacgctgacacgccgcggcggcgggagtcggcacgcagcaacgaggcggtcgaggaggcgcggatcaagctgctggagctgcggcaggtgaacaaggtgaaggctctcgtcggcgccttcgagaccgtcatggacgacaacgaaagccccgtcgccgcccgcaagtcgcggctgaacccccacgcctgaactacattcaacgagcacgaagctcgattgcgtgcgcttcctttatccctgctactctttaatcacccatcaacccaatttgtcgtcgtcgcccacttatctataattacggtaccgcttatattttgcaaggaggaagatgatggaggggttattatgatgtaataataataatgatcaaggaggataaaanaaaaaaaaaaaaaaaaaaaaaaaaagcggccgctcta

SEQ ID NO: 7076 - DNA, 391 bp, Triticum aestivum
  Clone ID: LIB104-016-Q1-E1-C6
ccggggcgccgggcaacggtgaaaagaatttgacaggtcttggagaaaatacataagactgatgataattcattcttacgtcaaactttaaaaagaatttgagaagctccgggaaaattagaagagtcaggtaagatcctgggaaagacctgtaggttagggtcaactcaaaagaaacaccgttgaacaatttaaaagcgaaattgcgccggttgaaataaatggcttgaatgaggtaacatccttaaaagaacttgattgaaatgagaatggaaacttgaaccttctgagatattttcgacactccgaaacaattgattaccaagaattggatgatttagaaggtgcaccgacatgagaaaccatttgaaccaaaaaaaagatatgatta

SEQ ID NO: 7077 - DNA, 456 bp, Triticum aestivum
  Clone ID: LIB104-016-Q1-E1-C7
ggggtgaaaggagaagttcctcgacctggaatatgatgttcaaggctcggtcaagtttggtgatggttcaaatgtggaaatttgcgggcaaggttctgtcctcttcgagggtctcataggagaacatcgcatactcaccggagtatactacatcccaaggcttcgcaacaacatcatctctgtcgggaaacctgacgagaatggatgcaaggtggatattgagaacggagtgatgacgatcttcgacaacctctcaaacgtgctagcccgtgtaaatcgcacacggaacaagctctatatcctcaaccttgatcaatcccaaccggagtgcgagctcgccaagagtgatgatgattcgtggttatggcaatgctagatttggacacgtcaacttctacaccttgaataagatgtcgaagatggagatggtatctgggatgccgtttattcaccatg

SEQ ID NO: 7078 - DNA, 476 bp, Triticum aestivum
  Clone ID: LIB104-016-Q1-E1-C9
gggtggccggggggacgagcgatggtcttttcctaccaatccatccccctaggagcatgtgcgtagtacttcgtttcgataactaatagatttttgcaataagtatgtgagttctttgtgactaatgttaagtccatggattatactcactctcacccttccaccattgctagcctctctaataccgcgcacctttcgccggtatcatacacccaccatataccttcctcaaaacagccaccatgcctacctattatggcatttccatagccattccgagatatattgccatgcaactttccaccgttccgtttgttatgacacgtttcatcattgtcatattgctttgcatgatcatgtagttgacatcgtatttgtggcaaagccaccttcataattatttcatacatgtcactcttgattcattgcatatcccggcacaccgccggaggcattcacatagagacatattttgt

SEQ ID NO: 7079 - DNA, 469 bp, Triticum aestivum
  Clone ID: LIB104-016-Q1-E1-D1
gtcgacggggaattttgctgtgttctcatccaacattatttttatttacatgatggcaagcaagcaataattttgttgtataagtcaatcatatgatacttcacaattgctaatacaaaaggttaggatggacatacagcacaagatagcctttcttgctcgtttctcaaaagacatgtttccgttggccaagagtttaacctgggtttgccgtttcatgctcaagaataaggataccacaaaggaatccggtcatataaaagcatatagtaaaaagaagtgtacaagtataatagcgatagcagagaggaatgtgttcctttatttataaacaataaggcgaattatagctatgactgaacttggcgtaagatctgttttagcttgatggctctatgcaaagctccctagtgagcaaccgcggcctttaaccaatcaagaagttcgccattgtcaactctactttttt

SEQ ID NO: 7080 - DNA, 482 bp, Triticum aestivum
  Clone ID: LIB104-016-Q1-E1-D12
tccggacttgccgggtcgccgggggtcacctcgatcggcgtccgcggcaaggactccgtctgcgtcgtcacccagaagaaagtcccggacaagttgctggatgacaccagcatcacgcacctgttctcgattaccaagtacaccggcttgcttgccactggcctcacagctgatgcgaggtccttggtctcccaagcaagaaatgaagcagctgagttccgtaaaaaatggggatatgagatgcctgtggatgtattagcaaaatggatagcagacaaagcacaaatatacacgcagcatgcgtacatgagaccccttggtgttgttgccatggtcttgggttacgatgaagagaaaaatgctcagctcttcaagtgtgaccccgcaggtcacttctttggacacaaggcaactagtgccggactgaaggagcaggaagcaataaattttctggagaagaaaatgaaggatagcccccagtt

SEQ ID NO: 7081 - DNA, 460 bp, Triticum aestivum
  Clone ID: LIB104-016-Q1-E1-D3
tcgacgggtctgcaacattcagatccgtatgtatcttgcaaatctctatgtctccctccttgacttgatcgcggatggaattgaagcgtctcttgatgtgcttggttctcttgtgaaatctggattcctttgccaaggcaattgcaccagaattgtcacaaaagattttcattggacccgatgcactaggtatgacacctagatcggatatgaactccttcatccagactccttcatttgttgcttccgaagcagctatgtattccgcttcacacgtagatcccgccacgacgctctgcttgcaactgcaccaactgacagctccaccatttaataaaaatatgtatccggtttgtgacttagagtcatccggatcagtgtcaaagcttgcatcgacataaacgttcacaacgagctctttgtttcctccatatacaagaaacatatccttagtcttttt

SEQ ID NO: 7082 - DNA, 460 bp, Triticum aestivum
  Clone ID: LIB104-016-Q1-E1-D4
gggctgtcatccgagttcagtttcctgatggagtaattctccagggtgtattccttccagcggaggctactggttcactatatgagtttgtcgcggacgctttgaagcagccaggtttggaattcgatcttatctgcccagctgttcctaggtcacgtgtgctaccgcattctccaaatacaggagagcgggcacgcacgttgcaagatgaaggcctggtaccttctgctctcctcaaattcaagcccaatgagactgattctgttgtgttcaccggcttgcttgacaagcttctggaggctagtgaaccatttacagctgcatcctcttgattgttggagttcgggcccacattctcccctcaaatcttctgttacattggacttcatactgttgtaactcagtcacagggatatgtcatctgcatactcgataggttgattgatagtctggtacatag

SEQ ID NO: 7083 - DNA, 133 bp, Triticum aestivum
  Clone ID: LIB104-016-Q1-E1-D7
aagcgacgtcggtcactgaagatcacaactcttgacatgcatcctggtgcagataaagcgtcacttgatgctcctagttctcaagtgaaatctgagttcctaaggaaaagcagttcctgaagtcgtggcattc

SEQ ID NO: 7084 - DNA, 294 bp, Triticum aestivum
  Clone ID: LIB104-016-Q1-E1-E1
tccgagtggacggggacccagtcgattgaccaatcaatgtcatttgctttgcaggcgtcacgcgctcacatgccgatctctgaggggatgctcaatgtgagaacctcgtcacgatgtcctacatgccttagcactgttcgcttactgtgctcggagtctcatgggtcactcgcatgcctacggcaggttaatcatttcgatccttctcctgtgtggaccatgagttcacagactctgcacatcgcttgttaacgtgcaccatgcaccttgtagaagtacatctggtcacatcag

SEQ ID NO: 7085 - DNA, 464 bp, Triticum aestivum
  Clone ID: LIB104-016-Q1-E1-E10
gggcaattggtgaccctctcggagcagcagctggtggactgtgaccagtacgacggcgggtgtaaccgcgggtcctatcacagggcttacaattggattgtggagaatggcggcctcaccacggcagcggattacccgtacacggcggtgaggggcgcctgcaaccgcgccaagtccgcccatcacaccgtcaagatcctcggcggcggcgtgatcccgcccaggaacgagcccgaaatgcagcttgccgtctccgggcagcccatcggcgtggccatcgaggtcggcagcggcatgcagttctacaggagcggcgtctactcgggcccttgcgggacaaatcttgctcacgccgttaccatcgtcggctatggcatcgacgccgctactggggccaagtactggctcgtcaagaactcgtgggggcagacgtggggtgagagcggctacatcggcatgcgccg

SEQ ID NO: 7086 - DNA, 466 bp, Triticum aestivum
  Clone ID: LIB104-016-Q1-E1-E11
gggagatggtggtagcactgctcgacgagtccgacctgtgcatctccgatagcgcagtcgaggagatcgttgacaatacgttcagtcaagcagactcgaatggcgatgacaggatagaccccaaggagtgggaggagttcgtcaagaagaacccagcatcgctgaggaacatgtcactgccctatctccaggacattacaacggcgtttccgagctttgtgatgcattcggaagccgacgattacagcggaatcagcaaataataaccgggccttagtgccacatgatccgctccggctatctatgaacatgctgctgggaggctggctgcgcgttcaattcagaggcgcgtgagctgcaaccggaaagcccggagctcgaatggggggagaacgcaagggagccgatccggtagccggtgagcgtgagatgatgtccaccggacgatgacttcatgtccatgcga

SEQ ID NO: 7087 - DNA, 496 bp, Triticum aestivum
  unsure at all n locations
  Clone ID: LIB104-016-Q1-E1-E2
gcctgtccgtacggctccggatattccaggtcgacgggaggataacgagatcactcctcacgagaagtggaccaagagtaggacaacactctcgtacttacgtacctggggatgcttggcgaaagttaatgtgtcgatccgcaaaaagcgtaagcatggaccaaagactgtggactgtgttaatttgggctatgctatgaatagtgttggctatagatttctagtagtgaaatctgaggtacctgacatgaaggtcggtacaattatggagtctaaagatgctacattctttgaggacattttccccatgagatatgtacaaagcacttctagacaggaatctgaggagactcctgaacctgccatttcgatggaatattataaccaaacacatgatgaaaatcccgaggaggataatgaggaattccttggtangggcaagagacaaaggactgtaaagacctttggtgatgatttcttcatatacctcgtggag

SEQ ID NO: 7088 - DNA, 438 bp, Triticum aestivum
  Clone ID: LIB104-016-Q1-E1-E3
ggggaccatcatgatcatgaagaatatataggataataaggcggtgtattaccgccatgccccgttgagctagctgatgttgtttcggctagagaaaatcgttacgcccgctcataattcctttttcgatgctctggagaataataactactggtatatcattctatatatcaaggccggcttgtgaaataaatgatcctgcgccccggtttttgtgtcgtcgatcaaaacaaaataaaaaatgaaaaaaatgaaaaaaaaacagaaaaaaaaaaaaaaaaatgtaaaaaacaataaaaaaaaaatataagaatcaaaaaaaaagaagaaataaaaaaaaaagggggccctccaaaagattcgaatttaagattatcgttatgagaaattaaaatctcttaaaaggggcgcctcaatttcgttatgagggtcatcttt

SEQ ID NO: 7089 - DNA, 465 bp, Triticum aestivum
  Clone ID: LIB104-016-Q1-E1-E5
ccggggcacggggaaaaggaaaagacccttcagtcctatttataaagcaagggacatgggtcaggtgcgaaaatcaaggagctgcaagtttggaaacagagttgtcgcctcgattatcgtagatctattaaacaagaaggtatcacagatagtttttttatgatagatgacgtcacgccgatttacagcaatcagagaagataacatcacggcggttcatcaaactataagaagatgttgaagatgaagtttttgctaaggattgacatgaacctgttcaaatcaatctggggcctaatgttggggatattactactgggcgtaaaccggcctatctgggccggattaacttcatcagtagttaagcatgttaaagcccatgaaggtagatgagggctcaagacccataatcggttgagagcctgtagccgtaaaccggtgtcaatatataacttgtattgtaag

SEQ ID NO: 7090 - DNA, 209 bp, Triticum aestivum
  Clone ID: LIB104-016-Q1-E1-E6
ttccggggcgacggggaaaatgacgagacacctcacacggtcatacaatgccaggtacccggttcatcgtacttccatcaaggaaccgcgcatctattaatctggggattcgcacgatcctgtgagctctcttacacaccggggataccacagttcaactctattgtgctaaatgaattccatccctatgatcacaatgagaaatcctt

SEQ ID NO: 7091 - DNA, 433 bp, Triticum aestivum
  Clone ID: LIB104-016-Q1-E1-F10
gggattgacgccaagcttcagcagaccggagggggctttcctcgcccttagaaggagcttgctgcagcctggcagttctatgtcgtatgctacctttagaactagagtaaaatgtaagaagtgaaagaacttgcgaggctatgattctgtgccatagcctgagggggggtctggaggtgaaagaacatcggagtactgttgatgtcgtgactgaactatcatccattgcctaatagatcatgccttgttgtgttcccaatgatttgcaatagaagaaacaatttcagatgaaagtaaaatccggcgctctaaaagattcaaacctaattgagcctggcagggacattaaaagtcctcgagaatgacaaccaaattcaacttcatgggcctcgcttttgcacgtcataaatgggaaaaacccggggttaaccaa

SEQ ID NO: 7092 - DNA, 474 bp, Triticum aestivum
  unsure at all n locations
  Clone ID: LIB104-016-Q1-E1-F11
ggggtcagaaattaagccaccaccgtgctcttaaagatataagtgaagcactagagcaaaaactatcaagctcaaaagatataagtgaagcacatagagtattctagcaaattctaatcaagtgggattctctcaaaaggtgtgtacagcaaggatgactgtggtaaactaaaaagcaaagactaatataatacacgacgctccaagaaaaacacatatcatgtggcgaataaaaatatagctccaagtaaagttaccaatgaacaaagacgaaagaggggatgccttcccagggcatccccaagcttaggcttttggctattattgaatatcttggggtgccttgggcatccccaagcttaggctcttgccactccttattccattgtccatcaaatctttacccaaaactagaaaacttcacaacacanaactcaacaggaaatctcataagctccgttagtgaaagaaaac

SEQ ID NO: 7093 - DNA, 458 bp, Triticum aestivum
  Clone ID: LIB104-016-Q1-E1-F12
gggcataaggcctaccccggcaacaagacggtgagtgaatttgctggcgagcactgcatcccagacatcgacgcggcatgcaaggatcccagctgcagcgacggtgcttacatcgaatgcggcagtgcggcgtcgagattctgctacatcaaggccacccccgccaacaagaaagccatacagcaaaacttggattgcttcaagagctgttgcgcgcagaagaagagtgaagactgccgtaatgaatgcatcctcaacaagagtagtccggccgcttgaaaaatgaaaatgcatgcattccttccttccttccttgtacttgggggtgtttccttcatttcagagtgcctcattcatgcatgttttcacatgcgcatgtattcatctcatttttttttgttgaacatttattttgtctttttttttgttgcgaaaataaaattcattttgttgttgac

SEQ ID NO: 7094 - DNA, 443 bp, Triticum aestivum
  Clone ID: LIB104-016-Q1-E1-F2
ggggaccaaactcaggctcccaacgcccaaagccttcgcatccagagctccaaaccctacgcgaggcgaggcgcggcgcagcggagggagaggccatggatcccgattcggtctcgaaggcgttcgtgcagcactactaccagacgttcgactccaaccgcgccgcgctggtggggctgtaccagaacggctccatgctcaccttcgagggcgagaagttcggcggccccgccgccatcgccggcaagctcggatctctccccttccagcattgccagcacaagatcgacaccgtcgactgccagccctcggggccccagggcggcgtcctcgtcttcgtctccggcaccatcatcaccggccccggcgagcaccccctcaagttctcacagatgttccatttgctgccatctggagggagcttctacgtgcagaatgacatg

SEQ ID NO: 7095 - DNA, 430 bp, Triticum aestivum
  Clone ID: LIB104-016-Q1-E1-F3
tcgacggggaagcggtcgttcgatgctgagacgccgcggcggcgggagtcggcacgcagcaacgaggcggtcgaggaggcgcggatcaagctgctggagctgcggcaggtgaacaaggtgaaggcgctcgtcggcgccttcgagaccgtcatggacgacaaccaaagccccgccaccgcccgcaagccgcggctcaacctccacgcctgaactacgagtacattccaccagcatgaagctcgatcgcgtgcgcctcctcctttatcccggctactctttaatcacccatcaacccaatttgtcgtcgtcgcacacttatctataattacggtatcgcttatattttgcaaggaggaagatgatggaggggttatcatgatgtaataataataatgatcatggaggaagatggtgtatttcactttatata

SEQ ID NO: 7096 - DNA, 439 bp, Triticum aestivum
  Clone ID: LIB104-016-Q1-E1-F4
ggggcacggggaggagaggaaggaagctgtgggtaagctcagggacacggtggttcagctcaggtctgccggtggccacgacgatgaggaacggcaacagcgatgactatattttctcggtccgctcggttggaccggttaaagaccggaccagaccgagaacttttcgggcctaatatggcagaccggaccgtccattttatgtagcgagctaggaccgagcgagccaagaccgaacgggccacgagcgggccgaaaagcccgcttggtacgtccagcctgacggacgacgatccaactgacttggttcctgccccaagtggctagatgtgcacgtacaaagctagcaccagtctccgatcgattcctttgtcagagacatatactagtactaactagtagagtgtccgtgcgttacaaaaatcacggaagaagaaag

SEQ ID NO: 7097 - DNA, 459 bp, Triticum aestivum
  Clone ID: LIB104-016-Q1-E1-F6
tccgtacattcccggggcgccggggaggttgagaagctgattggcaggatagtgaagtggctgaagcccggtgggcatattttcatcagggaatcgtgcttccaccagtctggggattccaagaggaaagtgaacccgacgcactaccgggagccgaggttctacaccaaggtgtttaaggaatgccactcctatgaccaagaggggaattcctttgagctttctctggtaacttccaagtgcattggagcttatgtgaaaagcaagaagaaccagaaccagatatgttggctgtgggagaaggtcaagtgcacagaagacaaaggctttcagagattcctggacaatgtgcagtacaaatccactggaatcttgcgttatgagcgcgtgtttggggagggttatgttagcaccggtggattcgagaccacaaaggagtttgtggacaagctggacctg

SEQ ID NO: 7098 - DNA, 467 bp, Triticum aestivum
  Clone ID: LIB104-016-Q1-E1-F8
tcccggggcgccgggcaccatcgtaaagaacaccaagcgaaattagattcctccttagccatggcacacgctgactccccgaagcatccgctcaactccgtcaaacatcctgattttgatgtcacctactccagcgacacgataacccgtgtcatcgcccctgttcaagaattcatccaattaaccagttaacttgccgactaatccctactcatagggtcaccgagccgccgataaaccgaaaaatcgtctgattaattgattaaatggccgattaacttgccgattagccgattaatcccctactcgctagccaaccgagcagctaccagttaacgatttcctcaacaatggtcatcgcccacataggctaaaccaaactcaccagacttgtacgaagagaaccactccctgttgggcgtcgcatgaaaagagcaagctaaatccaacatccatgcttcagtttt

SEQ ID NO: 7099 - DNA, 275 bp, Triticum aestivum
  Clone ID: LIB104-016-Q1-E1-F9
cggcagcagcagcagcgacagcgacagcgactgagccagctccggccgcgctccggcagcagcgtgcagtgtacgcgagatcgatgaccgcttgggagaagtgtggcatacatatatgttgcagggtttggagcgtgtggtaccatatgtatgtaatgcgtgacatgtctcacggatcttgtgatgtataataattagccggctgcactgcactgcacggtgcttgtcatactaacgttaatgaatcatgttggtattgatgcatctccgtttgg

SEQ ID NO: 7100 - DNA, 462 bp, Triticum aestivum
  Clone ID: LIB104-016-Q1-E1-G1
ggggacctggagatacaacatttggagttgtatggtttgcaggagcaaggtgctgcagttagggagcttgagaaccaactgaagataaacaatgtcgagtcacagctatactccttgaagatcgaatccttgcaatctgaaaatcagaggttacaaacacagttgtctgaaagctcaaagttaacttcccagcttgagttgacaaaatcaaaatgcaagctgttgaaaaagaagttgagactggatgcggaacaagcaaaggagaaaatcacttcccttcagaacatagttgattcctttcagtgtaaggagattattgagggagaagttgacggcgaggctgagaagaaattaaagaggctagaggaattggaaaatgaggcaagagagcttagagctgcaaattcaaggctgcagcaggagaattcacaccttactaggcgattggagctcacacgccta

SEQ ID NO: 7101 - DNA, 468 bp, Triticum aestivum
  Clone ID: LIB104-016-Q1-E1-G10
ggggatcagtttaatgcttgataattgttttgagatatggaggtagtaatgttagagtcatgcaaatgggtaattatgaaattgagaaatacgtgtgctgaacttggcaagtcccgtagcatgcatggatggtagaagttgtgtgacagatttgttgcatgaggtgctcttttgattgccttccttatgagtggaggtcgggatcgcgcgatggttaactcctaccatcccttcggctacgagcatgcgtagtaggactttgcctcgaaggcaggtacacttttgcaataagtatatgagttccttatgactaatgtgagtccatggatatacgcacactcagccttccacattgctaaccacgacattaccacgcaactttcgccggtatcatgcaccccttagttaccttcctcaaaatagccaccatacctacctagtatggcatttccacagccattccgagat

SEQ ID NO: 7102 - DNA, 455 bp, Triticum aestivum
  Clone ID: LIB104-016-Q1-E1-G11
gggtctacttagaaagatgacaggaattggtcattcacatggttagtcataaaatcctacataagatttgtagatcactgaatatgatatgtttgattccttgcaatagttttgcgatatagagatgataatatgtgggaggttctagtagatggttgtgtttagtaagaatattggtgttaaggtttgtgattcccgaagcatgcacgtatggtctcctaactatgtaaccaaattggcgcacattgtattttgattgtttatctttacgtgaaggtcgggcgcacgcgatggttagctcctaccaacctcccccctaggagcatgcgtagtagtactttgcttcgagggctaataaacttttgcaataagtatatgagttctttatgactaatgtgagtccatggattatacgcactcttacccttccatcattgctagcctcttccgtaccg

SEQ ID NO: 7103 - DNA, 471 bp, Triticum aestivum
  Clone ID: LIB104-016-Q1-E1-G12
gggtacatgattcacaagggggcgacggtgaacttcatggtggccgagatgagcagggacgagcgggagtgggagaagccaacggagttcgtgccggaacggttcctgccaggcggcgcgggcgaggctgtggatgtgaccggcaaccgggagatcaagatgatgccgttcggcgtgggccggaggatctgcgccgggctgggcatcgccatgctccacctggagtacttcgtggccaacatggtgagggagttcgagtggcaggaggtcaccggcgaggaggtggacttcgccgagaagaacgagttcaccgtcgtcatgaagaagccgctgcgcccacgcctcgtgccccgaagggcctgagacaaagtccatctccatcagccagtagtcaaatccgaccaatagtccactcctatcgcttcggtcgttcttgtttagttactctatggttgataatggttaattcgt

SEQ ID NO: 7104 - DNA, 460 bp, Triticum aestivum
  unsure at all n locations
  Clone ID: LIB104-016-Q1-E1-G2
ggggtcatatttcagggcccaatgcatggtagtagctgttcatggatcacaaacatagaactcagttcctgaggacgtcttcaatgagacaaccaaccatgtactcctacgtggcttctcaccgctacctttaccaaatcgtattcacacacttagctctcaacagtaggacatgttcaccaatttccaattcatccccgatgaatcagacctgactcaactctaagcggtagcaggcacgacgaaaaaagcatgaatgagtaggcacatcagggctcaaacaactcctactcatgctaatgtgtttcatctatttactgtggcaatgacaggtcatgcagaggaaaaggggttcaactaccgcagcatgtaacacttgaattgttgttgtcctaatgcagtanaagagagcaagagcgagagaatgggattgtatcggaatgaacaaggggttttgctt

SEQ ID NO: 7105 - DNA, 354 bp, Triticum aestivum
  Clone ID: LIB104-016-Q1-E1-G3
ggggtccacacacagttttgaatcgatttatcttttttgctgagagctgctcagatgtccaaataagttgaaattttaagcgaacctcatgcatcaaattgccaatcacacaaaaaattagatttttttaaatttttttagtatttattttgattttttttgaccgggtgcatgagtctgggcaccgaattgggttttcgtttgtaaaccccatttactggtacaagaggttatcagaagtctaaaactaaatgtaatgtagatctctagagatgtaatttgcattgcatttatagcacaggaagtagtatcctggaacatttggtgacatcaataaaaaagaaagagaagttc

SEQ ID NO: 7106 - DNA, 408 bp, Triticum aestivum
  Clone ID: LIB104-016-Q1-E1-G6
cccggggcgccgggcaagatcaagacctacctggcgcgcccatggaaggagtactccaggaccatctacatccagaacgagatcggcgccttcatcgaccccaagggctggctcgagtggaacggcgacttcgccctcgagaccctcttctacgccgaggtggagaacaccgggcccggcgccgacatgagccagcgcgccaagtggggcggcatcaagactgtcacctacgccgacgcgcagaaggagtacaccgtcgaagccttcatccagggcgagtagttcatccccaagtacggcgtgcccttcatcccggggctcctcccgcagtcagaggcggggagggatcattaactcatcactccatccctcaccatgtttcattattccgctgctccattgctgctt

SEQ ID NO: 7107 - DNA, 474 bp, Triticum aestivum
  Clone ID: LIB104-016-Q1-E1-G7
tccgatgattccgggtggccggggccacggtagacatcccacctttcttcttcaacaattatcggttagtatcggttgagcctaagtttttgcttcttcacatgatgagtgctatccttgaaatgtacttttattttgttttgcttgttgtttgaataatatcccaagatctaaaattcttaaatgttacagagtcttcacatagttacataattattcgactactcattgatcttcacttatatcttttgtagtagtttgtcatttgctctagtgcttcacttatatcttcctagagcatggcggtagttttattttgtagaaattattgatctctcatgctccacttatattattttgagagtcctaaacagcatggtaattttctttagttatgaaactagtcctaatatgatagacatccaagatggttataataaaaactttcatatagagtgcattaaatactatgat

SEQ ID NO: 7108 - DNA, 440 bp, Triticum aestivum
  Clone ID: LIB104-016-Q1-E1-G8
ggggaagcggtcgatcgatgctgagacgccgcggcggcgggagtcggcacgcagcaacgaggcggtcgaggaggcgcggatcaagctgctggagctgcggcaggtgaacaaggtgaaggcgctcgtcggcgccttcgagaccgtcatggacgacaaccaaagccccgccaccgcccgcaagccgcggctcaacctccacgcctgaactacgagtacattccaccagcatgaagctcgatcgcgtgcgcctcctcctttatcccggctactctttaatcacccatcaacccaatttgtcgtcgtcgcacacttatctataattacggtatcgcttatattttgcaaggaggaagatgatggacgggttatcatgatgtaataataataatgatcatggaggaagatggtgtagttcactttatatacgatcatcgacacga

SEQ ID NO: 7109 - DNA, 303 bp, Triticum aestivum
  Clone ID: LIB104-016-Q1-E1-G9
tggactagggcgtacagggcgcggagctgcgcaggtccacgtctttcggggtaagaagcaggacgcatgatgcgacgaggcaggaggacatgtactcgtcgtggatgaacgacggtggcagcgacatgctggcggcgcggtggtcggacctggagcagatggtcgcctagttaattaattcacattttcgtttcagactccagtatataaggagaaaaagaaatatgtaatcgttctttgttttttttcaaacttgttgtgctcgaacactgataaaaagaaaatttcacgcccaaaacaaaa

SEQ ID NO: 7110 - DNA, 475 bp, Triticum aestivum
  Clone ID: LIB104-016-Q1-E1-H1
ttccgaggtcgccgggggcagaagctgaggcacccaggttccccgcggcacggatcaaaaagataatgcaagcagatgaggatgttggcaaaattgcactggctgtgcctgttttagtttcgagagcccttgaattgtttctgcaagatttgatcgaccactcatacaaaattactcttcaaagtggtgcaaagacactgaattccttccacctaaagcaatgtgtgaagaggtacagctcttttgacttcctaactgagattgtcaacaaggtgccagatctcggtggcggtgaatcttgtggagatgaaagaggattacccagaagaaggaaattttcaaatggaagcgacccagagaatgaggagccccgatctagcaaaatgcccataagaagcttgaacaccagtcccagaggacgaggcagaggtcgaggaagaaggcgagggcggcctccaaccaagagaaaggaaat

SEQ ID NO: 7111 - DNA, 458 bp, Triticum aestivum
  Clone ID: LIB104-016-Q1-E1-H12
ggggaattttgtttgcagttattttgatttgatttgcataaagcatgggactgggcatcctggtgacgagccatttctgagtgaggagcggagtccactcctcttgagaataacccgcctaacatggaagatacgaacagccctagttgatacatgagctatttgggcatacaaaacagaatgtttatttaaaggtttagagtttggcacatacaaatttacttggaacggcaggtagataccgtatataggtaggtatggtggactcatatggaacaactttggggtttatggaattcgatgcacaagtagtattccagcttagtacaagtgaacgctagcaaaagactgggaagcgaccagctagagagcgacaacagtaatgaacatgcattaaaattaatcaacaccgaatgcaagcatgagtacgatataatgcgccatgaacgcaaatatcg

SEQ ID NO: 7112 - DNA, 458 bp, Triticum aestivum
  Clone ID: LIB104-016-Q1-E1-H3
gggacgctgttgattggtgaacgtatggtgtgtttctttaagaccttgtgctctggtaagacagtcttcagaggtcctgtgaatgatcatgcattgcaaaatgtcatttccgagaatctccggttcccggccttcccggttgtcatcaaccatgcctaggatctcatcagaggattgctagtcaaggacctggtcaacaggctgggaacattgagaggagccaccgcgatcatccatcaccctttctttgaacggttgaactggtccttgatacgatctgctgccccaacatagacaccgtcgtgccatgtcctgactcttgcgacggtccgccatactacagaaagcaaatgtctggacttcatgatctccgagtagcagtactttgaacttttctagataagtctttagtacatttagcacaatttcagctgatagtctacaatttttctgttgac

SEQ ID NO: 7113 - DNA, 443 bp, Triticum aestivum
  Clone ID: LIB104-016-Q1-E1-H4
ggaaagtacccacacctacggcggctactccaacatggtggtggtgcacgagcgcttcgtggtccggttcccggacgccatgccgctggacaagggcgcgcccctgctgtgcgccggcatcaccgtgtacacccccatgaaataccatgggctgaacgctcccgggatgcacctcggcgtactgggcctgagcgggctcagtcacgtcgccctcaagttcggtaaggccttccggatgaaggtgacggtgatcagctcatcgccggggaagaagcaggaggccctcgacaggctaagcgccgacggcttcgttgtcagcaagaacgccgacgagatgaaggctgcgatgagcaccatggatggcatcataaacacggtgtctgcaaacatccccatgggccctctcgtcgggctactcaagctcaaaggcaagatggtcaagg

SEQ ID NO: 7114 - DNA, 120 bp, Triticum aestivum
  Clone ID: LIB104-016-Q1-E1-H5
ggggtactgtcgaagttccgcgttggttcgctctccggcgtccgttcttctgttccggcgcttggtttcgctgtggtgcctcttgctggtgttggtttcgggacgccgttgggtctctgc

SEQ ID NO: 7115 - DNA, 309 bp, Triticum aestivum
  Clone ID: LIB104-016-Q1-E1-H6
aggagacccccgccgcgtcggtacatgagagaaggcactggcgcagtcatggcttagatatgaaagttttggacaccgagcggaactcagtcgagagcttatatatgaaaactagtgagagagagaagactatatttatgcaattagaagagaactatatacattgtttttccctaagctcaataaggtctgtgtcctttgtggactgcgtttcttctttgtagagacagaatatataagaccgaggattgcattcaaatggaaattaaattcaagtttagaaaagaacattagaactggcaatgctaa

SEQ ID NO: 7116 - DNA, 446 bp, Triticum aestivum
  Clone ID: LIB104-016-Q1-E1-H7
tgagcacggaggacgtgtacgaggcatggggcacattccgtggaaaatagggttcccccagaacgatgacccgtacggttacagtagccggaagagaaagatggatcgggaagcaaatgttgtggcgcggttggcatcggaaatggatgtgatgaacaaaaccgtgagtgtactactagccgaaagacatgcagctcgggcgcaacatgaagatcatccagcggatctcataagccagcagcggataagcaatgtggcttccactgaggccccatcggctggtgcagatgcaccgacgatcgaaattactgcaccggaacctctggtggtcgaaattactgcacctgagcctctggtggacaacattactgcaccggagcctcctcgctaccccgtggacgatataaacgagatgatagagtgtcatctgtattatcctagcggga

SEQ ID NO: 7117 - DNA, 464 bp, Triticum aestivum
  Clone ID: LIB104-017-Q1-E1-A10
gggaagatgctcaggctgggtggcggatggagcagggtgtggggtttcgtcgcgggttttcgcggcctcggtgtacgaatgggtgggcagatgggatggcagtagggaaccatggcttagagacgcgcttgtccgaaatgtggggtaagttacggaagtacccccactgatttgaggtggttctttcggttcaggggtaccacgggcatttcgtgtgtcgggatttcacaggaggtgggagtttccgcacgcgttgtaatttcggaatagcaaggcgcgggttgagatggagggagttgtcggagcacacagagacaaagatatatcttaaatatttcgggctaacaaggcgcgggttgaagacgcgggagtttcacatcacgatagacagagacggtagcttgaattttcggcataacaaggcgcagcttgaaatttcggaagaacaagcttaacgtgtaccc

SEQ ID NO: 7118 - DNA, 381 bp, Triticum aestivum
  Clone ID: LIB104-017-Q1-E1-A11
aggaaggttcatggttcggatcatggggtatttgcttcacatacggcacgtggtttgctatagagggcctatcggcagttggacagtgttacaataatagcacctacatccggaagggttgccagtttctattatcaaagcagctaaggaatggtggatggggtgagagtcatctttcatccacaaccaaggcatacacgaacctagacggggagaaatcacatgtagtcaacaccgcatgggcaatgttggcactaatgaaagctggacaggccgaacgaaatccgtctcctttgcacgaagctgcaagacttatcatgagcatgcaacttggcaatggtgacttcccacaggaggaaatgattggaagtttcttgaaaa

SEQ ID NO: 7119 - DNA, 478 bp, Triticum aestivum
  Clone ID: LIB104-017-Q1-E1-A12
tccggatttcgcgggtggccgtacaccgctcaccatcgacgtgcccgggtggctcaaggtgaaggtggagccagaggcgctggagttcacgtcggcgatggagaagaagacattcacggtgaccgtgagcagcaggggaggcgacgccgacgccgggcagctggcagaggggagcctacgctgggtgtctgaagatcacgtggtgcggagcccgatcatcgcggacgccagggttgtcccgacatgattctgtcaggcgttcgttgtactcagccagcctggttagcataagcacaagtatccatacagttcacaacatggagacattatcgttcttcccaactagcactactccttgaggtcccgattgcaaacatgcaatcacacaaatagggcacttatcaaaggaggtcactgagataaccttgtatctttactgtatcaaatatcactactcaaaatcctcaagttgcccagt

SEQ ID NO: 7120 - DNA, 343 bp, Triticum aestivum
  Clone ID: LIB104-017-Q1-E1-A2
ttaacccaaccctcccccaaaccgaacccaaccggaaggaatccccccgcccctgaacggtatttccaattataagggcctaattgccttcttccctggtaaatttgatttcttccagatccgagactgaagtttcgtgattttgaattatactcagtgattgtaataatcgggatactgaggatgtttaccactgctcaagaaatataaaaaaggatgacacatattcttggttctgaatttttgaacatgcctgagcattcataagatgcaggaaccctatttgggttggctttggcttatgtcagctattgaacttactagcttataaaccagatcatgc

SEQ ID NO: 7121 - DNA, 391 bp, Triticum aestivum
  Clone ID: LIB104-017-Q1-E1-A3
cccgggtcgacggggcggctgaactagcgggagtaactgaagtggctgaagcccggtgggcatattttcatcacggaatcctgcttccaccagtctggggattccaagacgaaagtgaacccgacgcactaccgggagccgacgttctacaccaaggtgtttaaggaatgccactcctatgaccacgaagggaattcctttgagctttctctggtaacttccaagtgcattggagcttatgtgaaaagcaagaagaaccagaaccagatatgttggctgtgggagaaagtcaagtgcacagaagacaaaggctttcagagattcctggacaatgtgcagtacaaatccactggaatcttgcgttatgagcgcgtgtttggggaaggttatg

SEQ ID NO: 7122 - DNA, 430 bp, Triticum aestivum
  unsure at all n locations
  Clone ID: LIB104-017-Q1-E1-A4
gggtcgacggggaagtagacgtcagagtccatgatgaagaagccagtagtcgcgcagaacgctccccaaaaaccttattacccttctcccgtacaggactcaaagcggtgtggtttcggaggcctactatcctgactcgtggtgcatgctgcaagccgggatgangaagacaacagtagctcagagaatggaaccggtggcgagaggaaggagaagttctggtgcatctctctgggaggaccgacctcncttttataggcgcaagagaaggaggcgagaagctgcgccgggagctgagctgaagggatcgagggagacgaaacgaagaggcagcagccgaagggtgctgcgttcgtattcaatatccactacagcaaaaactttctagctcccgagtggcctttcgtatacccgtagtgcatggcaaaaa

SEQ ID NO: 7123 - DNA, 377 bp, Triticum aestivum
  Clone ID: LIB104-017-Q1-E1-A5
ctagcgggatgacgggatggatgaaggatcatcatccggggaggtggacgagggacaatgagctgttgcggtggacgatgtcgtcggggaaagaggctccggctgggcagcggtgaggtggcggacggagcagggtggggtttcgcggctggagcggagaggttatggcagcctgggatttcgaatggcgaaaaggaggcgatgggaggggtcaaccatgacttagggacacgcttgtccaaaatgtagggtgtgttacaaaagtacccccaccaatttgaactagcggccctttcggctcagggttagaagtgggatttcgtgtgtcgggatgtggcagctggagggagttttcgcgcacattgtaatttcaggat

SEQ ID NO: 7124 - DNA, 406 bp, Triticum aestivum
  Clone ID: LIB104-017-Q1-E1-B1
cgggtcgacggcggtcccgtttcgagtcaccaactggggccaatggtggtgggccaggagcgagggacattggtcccggtttgtcccaccaaccgggaccaataggtccagacgaaccgggaccaatggcccacgtggcccggccggcccctggggctcacgaaccgggtccaatgcccccattggtcccggttctggattgaaccgggactaatgggctggatcggcctggaccattggccccttttctactagtgttatagaatgcttcatgtgcttcacttatatcatttgaagtttggatttcttgtttctcttcacatagaaaactgatgttcgtagaatgctcttttgcttcacttatatttgttagagcatggtcttttgtagaaagaattaaaatctc

SEQ ID NO: 7125 - DNA, 349 bp, Triticum aestivum
  Clone ID: LIB104-017-Q1-E1-B10
ccgttggttatagataaacttctagtcatcacacgacagttgattcatctggtgcgtcatatgctaattgcatcattgcctgctactcatatatagtcatccttgctttagacaccttgcgtgatatccatctatcaactgtacattaatatacagctcatagagcttcccctacatcttcgaggcgtaacacatatgctcatactgcggcacttccacatttttatcgtcatagtttgtgcgctagttcatcccttatatattttaaagcattgatgtcgatcgactattgattgactgatgatgtctcacgcttcacttagattattttgagactcctgcacaacat

SEQ ID NO: 7126 - DNA, 457 bp, Triticum aestivum
  Clone ID: LIB104-017-Q1-E1-B11
tcctaggtcgccgggctccgggcccaaggacaacggcggcgcctgcgggtacaaggaggtggacaaggcccccttccacggcatgacctcctgcggcaacatccccatcttcaaggacggccgcggctgcggctcctgcttcgagctcaagtgcaccaagccagaggcctgctccggcaagcccaccatcgtcaccatcaccgacaagaacgaggagcccatcgccccctaccacttcgacctctccggccacgccttcggctccatggccaagaagggcgaggagcagaagctgcgcgacgccggcgaggtggagatcatgttccggcgcgtcaagtgcaagtacccgccgggcaccaaggtgaacttccacgtggagaagtcctccaacgaaaactacctggcgctggtgatcaaattcctccaaggcgacggcgacgtggtgggcgtggacatc

SEQ ID NO: 7127 - DNA, 396 bp, Triticum aestivum
  Clone ID: LIB104-017-Q1-E1-B3
atgatcgattagattgctgctattgctttcttcatgacttatacatgttcctatgactatgagattatgcaactcccgattaccggaggaacacattgtgtgctaccaaacgtcacaacgtaactgggtgattataaatgtgctctacaagtgtctccgatggtactttttgagttggcatagatcgagattaggatttttcactccgattgtcggagaggtatctttgggccctctcggtaattcacatcactataagccttgcaagcaatgcaactaaagagttagttgcgggatagtgcattacaaaacgagtaaagaaacatgccggtaacgagattgaattggtattgagacaccgacgatcgaatctcgggcaagtaacatactgatgac

SEQ ID NO: 7128 - DNA, 431 bp, Triticum aestivum
  unsure at all n locations
  Clone ID: LIB104-017-Q1-E1-B4
cgggtcgacgggttgctgtagattaccttgattaggttgctgattgaaaccgccttgattgccttggccctgaaatccagagtttgaaccgccacctccaaagtcgggcccgtgagagcggatcctgacccgccatgcggtccgtgattgtcctgataaaaaccggaatttctgtattccctcatgatgaagcaatcttcccatagatgagtggccggcttatcttgagaaccgtgctttgggcaaggctggttcattatcgcctcaaggttgaacttgggcccgccaaaccggggcattgacgatttccccttacgacgctgattattattctgcgtgttggtattggccacaaagtccgaatcgccgtcggcttgcttgcgcttaacattattaccttgacncgccgtattgtgccgctgcccctttgc

SEQ ID NO: 7129 - DNA, 427 bp, Triticum aestivum
  Clone ID: LIB104-017-Q1-E1-B7
aattcccgggccgacgggaggaagaaacggcgccgtccgttcccctgccatgcctgcacccagcggggccctcaccaggcctccacttcgccggaccaccgtatcctgccgggcaaagggtagcccggccgtggcgtactgcacgctaccggttctgcagctactctattatgtcagaacacttgagagggatgaaagtgaaacagcagcaccagcagcagcgaagatactgctgctccctcctcactcgtaccctgctcccgctggtcctactcctcaccggagccaaccgcaaacagggcagattgtgatcatttctgaactagcaagatacagcacagcgcagcattctgtctatatatccctccctgcttccctgtctgaacttttgtttgaaacagagttcctgaacttcctaattaacatg

SEQ ID NO: 7130 - DNA, 425 bp, Triticum aestivum
  Clone ID: LIB104-017-Q1-E1-C1
gggtcgaggggaattcaccattaacaggctaattgccctattatcaataatcaattttaatctaattgaaattcatattaagcacataatatatttcatttccatattaaggaagcagaatttcataattgaaatacatcagagtacaacatgatatagcttcagcactcagctaccccattacacaactgcaccagcatcaagtttcacatgcaacatgtagaacctttcaaaattagcatcatagacagtatatagacagatgcatctcatctggaaaagtgctgaagcggaaggcgaatattgagccttcattcatgttgaaggtctttgcaactttaggccagtgcctgtggatgattgaccgtccgtcctgcatcctcttcaggaacacttcaatattgaaccgtgggtgttgtatgaaa

SEQ ID NO: 7131 - DNA, 411 bp, Triticum aestivum
  Clone ID: LIB104-017-Q1-E1-C11
ggagcggaagcaagcctacatagcggagctcgagtcgctggtcacccagctcgaagaggagaacgcccacctgtccaaagaacaggaggaggcaaaccagagacggctgaaagagctcaaggaaaaattgactccagtcattattgcaaaaacgccgtcacaagatcttagaagaacaaactcaatggagtggtagacatgagccaagctcagtagccatccccttacagctatgtagattttgatttgtttgtctgtcattcctctgtttattggagttaactcagttgttgtaacttagtagatatagcataaacagcttaaatggaatcataatgtgtagagcggaaggctgcgtttgagcaaaatggaatctcatcagcagcttatattctgtctgatttgcctttc

SEQ ID NO: 7132 - DNA, 445 bp, Triticum aestivum
  Clone ID: LIB104-017-Q1-E1-C8
atgcccgggtcgacggggcacttgaccttctagctatagactgattgacaggcatggttcattgttatttccttcctttaatagtattgtaagggaagcaggttctccaaataaatgcggaagattgcagcatcaagggtatcacttcactggatttttctacttcttggtgggcagctaaattagtttccctggtccgtttctcaactatcacagaagaactctttactctgtaattttctctttatttgtgctgaaggcatagatcaagtgctacatggctatgctcttcggagcttagagcatcagtggttggcctcctttctatttgttcttttttctaggatttgcgtgtgttaatcggatgaatatatggaaggatacagagaggccagagagtttgctatcaaattctcaagcagcaagaagatagctagcctaaatg

SEQ ID NO: 7133 - DNA, 276 bp, Triticum aestivum
  Clone ID: LIB104-017-Q1-E1-D11
ggatcgtctgcgacagcggagatggcgtcctcgtggagcttgtgaatgggattctgcaaagatcagactgggaggaagcaataaaaatgccaattggggtagttccagctggcacaggaaacggcatggccaaatcgcttctgcatgctgccagcgagacgtgctcagtttcagacgccgtatttgccattatcagaggtcatagtatgctttcaggcacataatataagtttccacggcagtttcaaatagagaaatctgatggaaacaacaact

SEQ ID NO: 7134 - DNA, 394 bp, Triticum aestivum
  unsure at all n locations
  Clone ID: LIB104-017-Q1-E1-D3
gggtcgagcgcggaagcggacgtcaatcttangccactgacgatggaggacctgaggcangccanaaatcaggtcgccgcgagcttcgccgcggagggcgctgtcatgaacgagctgaagcagtggaacgacctctacggcgaagganggtcgaggaagaaggagcagctgacctactttttgtagaaccggaaggatggtggatgtgtcgtgttgggcaaatcgctgaagccttggcagagcatgagcatacatatgttggtgggaaaaggatagaggatttcctgtgagcaaccgtgagttaggatcttggagtgaatggactccttgagatgtgtggcagggggcattggatcatgtacgattcttttatacgaacaagtattgtagttat

SEQ ID NO: 7135 - DNA, 382 bp, Triticum aestivum
  unsure at all n locations
  Clone ID: LIB104-017-Q1-E1-D4
gggtcgaggcaaagagctgaggcacgctggcggagacggtgaagggcgtgatgcgggagtacccgaagctgcgcatgtcgcacgggcggatggtgttcgaggtgcggcccaccatcaagtgggacaagggcaacgccctcgagttcctgctcgagtcgctgggcttcgccgactgccccaacgtgctgcccgtctacatcggcgacgaccgcaccgacgaggacgccttcaaggtgctgcgccggaggggccatggcgtcgggatcctcgtctccaagcaccccaaggacaccagcgcctccttctcgctgcangagccggccgaggtcatggagttcctgctccgcctcgtcgagtggaagcagctctccaaggcgcgcct

SEQ ID NO: 7136 - DNA, 457 bp, Triticum aestivum
  Clone ID: LIB104-017-Q1-E1-E10
gggattgggccgaatccccatccccaaattcgagcgccgctgtgatttcctcgccccgcctccctccttccccggtgagtttccttggagtaggggagatacccctttgcgaccaatggcaggatcttccatcagcaccacttcggtcctccaattcctcccatcttggcgcccgcatcgctgtccatggcgcacccctttggtgtcctccagagtggtcgccggtgctggcacttgtgctcgttggatacaacatgctcttctttgacaaccatggtgcacggcgacgaggtgccttgttccgtgcggttcgttgttcatcggagtcacctcgttttttttgcagtacagagaagctacggtgcagtcccttaacctgagcatgatactcacctccccctgacattgcagttcgctgtagtactccggtaatgccatggcgctggagttcacagtg

SEQ ID NO: 7137 - DNA, 468 bp, Triticum aestivum
  Clone ID: LIB104-017-Q1-E1-E11
ggcaactcgtaaagataatcaaggttcttggaacgccaactcgggaggaaatacgttgtatgaacccgaattatacggagtttaggtttccgcagataaaagctcatccttggcacaaggttttccacaagaaaatgcctcctgaagccatagatcttgcttcacgtcttcttcaatattcaccaagcctccgttgcactgctcttgacgcatgtgcgcatcctttctttgatgagctacgggagcctaatgcgcgcctgccaaacggacgcccgttcccacctctgttcaacttcaagcatgaactggccaatgcttcacaagacctcatcaacaggcttgtgcctgaacatgttcgccgacaagctggtcttgctttcgtgcatgcggggagctaaatatgcgcaccggtgccctcaaccttgcaccttattgttttgccatgggcagaagggtggtggtttaaga

SEQ ID NO: 7138 - DNA, 415 bp, Triticum aestivum
  Clone ID: LIB104-017-Q1-E1-E2
gggtcgacgcgcacgatgacgaccaatgcaattgtttcatagttttgatgttctcaaactttttcaatcttcacgcaatacataagcgtgagccatggatatagcactaaggtggaataaaatatggtgggtgtgaagaacacaccaagggtgacgatattctcatatcaactatgcgtatcaatgggctatgaagatgcacatcaatacatatcactgtgagtgattagggattgccatgcaacggatgcactagagctataagtgtatgaaagctcaaattgaaactaagtaggtgtgcatccaaactgcttgcccacgatgatctatggcaatttgaagaagcccatcattggcatatacaagccatgttctataatgaaaaaaatccactagtatatgaaagtgaaaacat

SEQ ID NO: 7139 - DNA, 369 bp, Triticum aestivum
  Clone ID: LIB104-017-Q1-E1-E6
attccgggtcgacgggcgatgctaccgtgcccggagaagaagttgatccagcaggtggtgttcgccagctaccggaacccgctggggatctgcggcaactacacggtgggcaaatgccacacgcccaaggccaaggatattgtgacgaaagatttcgtggggaacaggagctgcgtgctggccgtgtcgcacgacgtgtactctggagaattcaactgtacgtgcaccacggtcacacatcacatccatgcaatagtgatcaactaggcataggaacgtggacctcacatgtaaactatcctcacagatataccgctagctttatcatcccaacaccttctgcatcacagcccattttcgctatcaggc

SEQ ID NO: 7140 - DNA, 416 bp, Triticum aestivum
  Clone ID: LIB104-017-Q1-E1-E7
ccggtcgacgggaaatcaaattagcaggctaattgccctattatcaataatcaattttaatctaattgaaattcatattaagcacataatatatttcatttccatattaaggaagcagaatttcataattgaaatacatcagagtacaacatgatatagcttcagcactcagctaccccattacacaactgcaccagcatcaagtttcacatgcaacatgtagaacctttcaaaattagcatcatagacagtatatagacagatgcatctcatctggaaaagtgctgaagcggaaggcgaatattgagccttcattcatgttgaaggtctttgcaactttaggccagtgcctgtggatgattgaccgtccgtcctgcatcctcttcaggaacacttcaatattgaaccgtgggtgt

SEQ ID NO: 7141 - DNA, 383 bp, Triticum aestivum
  Clone ID: LIB104-017-Q1-E1-E9
ggggtggtttatcagatggggtcagccaatgtgatagcaggacctgaatcacccaccttaaaggtggtcgtggtagactatgtgtattcattcttgaggaggaacttggcagagggtcacaaggtgttgtccattcctaaagatgagctgctcaaagttgggatcacatatgagatatagagatgttttttttttgtttttttttttttttgaaacggaacacagattgcattcctcctacatatcattgctgggcaaatccccagctacaaggttctgaacaaactctgggaattgtcccaaccaagtaatacatgcaccagagtttaatgttgctccgaaaaaataaaatccatttaaaacaaaaaaaaagcggccgctct

SEQ ID NO: 7142 - DNA, 454 bp, Triticum aestivum
  Clone ID: LIB104-017-Q1-E1-F10
gggctactgacatatataatcatcaaattttctcacccgtatgtcttttacatattgctctgtggctctggctagaccattttgagcggcacggaggtacgcatctcccgtattgaaggcatccaatgcctcttgggagaaacaagcatcacgaagaattgtccggcgacgcctgtggttcatggaactctccacctcggaattggtggcagacagcccgtccgcatcctctgtcagaggagcgtccggtgcatgcctcgtgttcgtctccgcttctggacccggccttggagcctggctggtggaggcgcggttggcaacctctccggatgtagtccggcgagcgctctttttcctaaaaaaagcacgggcgttagcatgccttgaaggaataaaacctgggaataaaacggcacgccatactgttgtgtccgcatctcaatccggaccgcac

SEQ ID NO: 7143 - DNA, 450 bp, Triticum aestivum
  Clone ID: LIB104-017-Q1-E1-F11
gggggcaagagaagtttggtggccttagggatggatactatatccatggtcagtgtgcgattatcatgtttgatgtcacttcaaggctgacctacaagaatgttcctacgtggcacagggacttgtgcagggtttgtgagaacatccccattgtgctgtgtggcaacaaggttgatgtgaagaacaggcaggttaaggccaagcaggtgacattccacaggaagaagaacctccagtactatgaaatctctgccaagagcaactacaactttgagaagcccttcctttaccttgctaggaagctggctggtgatcccaacatccacttcgtcgaagcagtggcccttaagcctccggaagtgaccttcgacttggccatgcagcaacagcacgacgctgagcttgcggctgcagtggcacagccactgcctgatgacgatgacgatctga

SEQ ID NO: 7144 - DNA, 397 bp, Triticum aestivum
  unsure at all n locations
  Clone ID: LIB104-017-Q1-E1-F2
cgggtcgacggggttcaagacgaaagtgcggtctccggcgaggaagagtagaacatgggagacggaccagccagttggcacaccatgcccagccgcctcccatgccctactcatcctcgaaggagtccccaaccttagcagtgccggacattggacggcggcaagtaggacgcgtggctgacggtgctcctgtcctcggccgccatcgtgtccactgtttggcagtcgcgtccgcgtctggctacgctgctattgcatcgcgagcgacgacttgagcgagggcagcgtcctcgagcttcatccccgaagacaaagctctcctgtagagcgttcacgctcgcggtcatggcggatgtggtgccaggtagcaggacgatgcgctatgggggaaaaanaa

SEQ ID NO: 7145 - DNA, 405 bp, Triticum aestivum
  Clone ID: LIB104-017-Q1-E1-F5
gggtcgacggggagtacaaaaaggcggaggagcacaagaagaaggacggggagcacaagaaggacggcgagcacaaggagggcatgatggagaagatcaaggacaagatcagcggcgacggccacggcgacggcaagaaggacggcgaccacaaggagaagaaggacaagaagcacaagaaggacaagaagcacggcgagggccacaacgacgacgaccaccacaacaccatcatcgcatcccattagcattctaccattttcctcggagagaagtagccagaaacagcagcgccatggccggcatcatgcacaagatcgaggagaagctccacatgggtggcggcagcgacgagcacaagaatgacgaggagtacaagaatgcggacgagcacaagaagaacga

SEQ ID NO: 7146 - DNA, 343 bp, Triticum aestivum
  Clone ID: LIB104-017-Q1-E1-F7
gtcgacggggaaatcgacgacttcgactccggcgccactgtctatggcgacaaacgacagagcattaagtctgccctcatcagatgttccagcgtagtacacacatctgccgttcaggacgatgtcggtgacactactaaagtggacagtggtacatcatatcatgaatacacaatgggaaaacaagcacgatacctgcgtaatgactaatgttgtctacgtgtcgcacacttcatgcataccagatcggaggatttctggactgatgtatgctgtcatgtctgttttgctgatgcatctacttccttagcacatctgtgaaatcttgtcttgctcgatggca

SEQ ID NO: 7147 - DNA, 423 bp, Triticum aestivum
  Clone ID: LIB104-017-Q1-E1-F8
attcccgggccgacgtatgtcgtgaacaagggtaaggttcccggagtctacgatgactgggaggagtgtcggagacaggttcaccgattcagcggtaacagttacaaagggtacacactagggccgaggccgaatctagatacgcccgctatctagcgggagaggggagggagcgttggaggaaccggatgaagacgagtttcatcgtgatgatgctcatcgtgatgaccgcagctctcttctatgtgatggtagtttagatgatcgatatcgacttgtaatgtgaagtcaaactcgctactcgcggtctcgagacttgtaatataatgttctatctttgtttggtcttttcaattcggagactaatatgatgaattgtattcggagactaatatgatgaattgtattcaaagactaattttt

SEQ ID NO: 7148 - DNA, 472 bp, Triticum aestivum
  Clone ID: LIB104-017-Q1-E1-G10
ggtactttggatagattaacacatacgagtatctcacatggttacatatatgcatatactccctgcgtccgaaaaaggaaaaatctacgtaggattattgattactgatataagccagcctcttctaaaaatgtaatacatatttaattgggcgtggctatatgtcaatcacgtgaaaataaatttagggtcagtcactttttcttttagggcaagcaggcacgaaggaacgctagccatatgtaagtagtattagcgtaaagtggcagtgctagctaattcacgtgtgcacgtctattttccctttgtgtgcgcgcgagtgtgtctgcgcgtgcacgctgccacatgtgcatgtgctcgcatgcgtgttactccatctatttctaaatatttgttttcctagagatttcaacaagtgactacatacagaacaaaatgagtgaatcatactttaaaatatgtctatatatat

SEQ ID NO: 7149 - DNA, 439 bp, Triticum aestivum
  Clone ID: LIB104-017-Q1-E1-G11
gggcgaagcgaagaggcggttccagcggatccaggaggcctactccgttttgtccgacaaggggaagagggccatgtacgacgccgggctctttgatcccctcgacgacgacgaccaggatttctcggagttcatgcaggagatgctggtgatgatggatagcgtgaaatactagaagccggacacgctcgaagacctgcataagatgctggatgacatagtcaacgggtacggcggtagccgcgccactgctggtgctggtggtagcggaggcggtggtggtggctgctgtagtcgcgttccagcggatgccaaccgcagaactcgtgtcgccccttacacgcagccttcgctaaggtgatggacgtcccggtgctcgtgacgtgcatgcaccgctgcacttgtacgatagagatcagagcaagaagagagcaaccag

SEQ ID NO: 7150 - DNA, 303 bp, Triticum aestivum
  Clone ID: LIB104-017-Q1-E1-G12
ggggacgtaaatgaagataaatggcagtggctgtacacacagatgaacgttcgtgcggtagggcgctcggagactcaagaactgctccgcgtccatcctcgacatcaccggttgtgtcaccagcaatgaccggctgattgtatcgctgactggaactgcatgcacccatgggatacgcaagcgagtatgacactgggaacacacgctaataataatctgctggaggtagctactcacatctgttacacgagacatgctagatgaccatgtaaacgtatccgtgggcaatatcctgatgctgga

SEQ ID NO: 7151 - DNA, 426 bp, Triticum aestivum
  unsure at all n locations
  Clone ID: LIB104-017-Q1-E1-G2
gggtcgaggcgatggtcnaatggataactccttagtcacattgagctcattatgatgatgcattaccgagtgggcccagagatacctctccgtcatacggagtaacaaatcccagtctcgatccgtgtcaacccaacagtcactttcagagatacccatagtgtacctttatagtcacccagttacgttgtgacgtttggtacacccaaagcactcctacggcatccgggagttacacgatctcatggtctaaggaaaagatacttgacattggaaaagctctagcaaacgaactacacgatctttgcgctatgcttaggattgggtcttgtccatcacatcattctcctaatgatgtgatcccattatcaatgacatccaatgtccatagtcaggaaaccatgactatctgttgatcaacgagct

SEQ ID NO: 7152 - DNA, 448 bp, Triticum aestivum
  Clone ID: LIB104-017-Q1-E1-G6
atgcccgggtcgacgggtaagaaaatagttcagagccacatgcaaactttcaaaattattgggcttatatctattttatagtaaatataaacccaattcaaatagctagtgaattaattcaaaggcccaagaataattatttctgtgattccaaaaatattggtttgagttttagctcttgccaatattttcagagattagcaggaacattttgttggggtcatttgaaaatattttaatgttgatcatttttaaaagatttctgaggcttgagaattccctcaattcaatttccttgaatttaagatgatgcatggatgcatatgcaatgacaagcaaaggccaaagctagggctgtgacagccatgctggagtccggaccgcttccggagcctgctctcaacgccctggcctctctagacgccagctgcccgcggcatgcatgcat

SEQ ID NO: 7153 - DNA, 457 bp, Triticum aestivum
  Clone ID: LIB104-017-Q1-E1-H10
ggggcaatagagaaggaatgggaaaagaagggttacttttattttcatttttcccttaaaagatagactttgaaataggagtcttggaataatgctgaattcaaaggtttatttctttctatagtataagaaagaaataaaatttatttctatttctatagtataagaaaaacaaatagtataagaaaaacaaatcgaatcaaattcatggatttaccacgacctcggttgtgactccatagataaaaatgggaaatttctctcttcgagaccattgaaaaagggcattgaacgagaaagaaatcgtccacagatgataaaactatcatatgccttggaaagtaatatgaggtgctcggaaatggttgaagtaattgaataggaggatcactatgactatagcccttggtagaattcctaaagaagaaaatgatctatttgatactatggatgactg

SEQ ID NO: 7154 - DNA, 61 bp, Triticum aestivum
  Clone ID: LIB104-017-Q1-E1-H2
gacgggtagaatgatcttttgatccacagggatgcggagaagtctgggcacaaccagtaag

SEQ ID NO: 7155 - DNA, 422 bp, Triticum aestivum
  unsure at all n locations
  Clone ID: LIB104-017-Q1-E1-H3
gggtcgaggcgatcgtctacgtcagcggcgatggcgtcctcgtggagcttgtgaatgggattctgcanagatcagactgggaggaaacaataaaaatgcaattggggtagttccagctggcacaagaaacggcatggccaaatcgcttctgcatgctgccagcgagacgtgctcagtttcagacgccgtatttgccattatcagaggtcacaagcaggccttggatgtttgcactatagcgcaaggggagaagattgttttcagcgtgctgtcaaccacctggggtttggtggcggatgttgacatcgagtccgagaaatacaggtggatggggagcgcgcggttcgacttttatgctctggttcgcataatgaacttgcgccgataccgcggaagtgtccacttcgtgcctgccccgggct

SEQ ID NO: 7156 - DNA, 444 bp, Triticum aestivum
  Clone ID: LIB104-017-Q1-E1-H6
gacgggtagaatgatcttttgattcacttatatttgttagagtgtgggcatatcttttgtagaaagaattaaactctcttgcttcacttatatctatttagagagatgataggaattggtcattcacatggttagtcataaaatcctacataaaacttgtagatcactgaatatgatgtgtttgattccttgcaatagttttgcgatataaagatggtgatattagagtcatgctagtgggtggttgtggattgcagaaatacttgtgttgaagtttgtgattcccgtagcatgcacgtatggtgaaccgttatgtaacgaagttggagcattaggtatttattgattgtcttccttataagtggcggtcggggacgagcgatggtattttcctaccaatctatccccctaagagcatgtgcatagtactttgttttgatgact

SEQ ID NO: 7157 - DNA, 421 bp, Triticum aestivum
  Clone ID: LIB104-017-Q1-E1-H8
cgggtacctgcacaagtgtcaaaggctttgaggtcgttcctgatcgatcgaattctcagcaaaggatacctacaagcctacagcattactagtactagcatccatgtgatgcacatgcatgctgcatatatatgcatgaactttcaactggagataactcagatgacatgcatgcaggttgcatacatggaacttgagatagggaaaatgtttcgtgttttcttctgagtctatgtttttttcttctgcgtttatgtactcggtttccttacggccatgctcgaaactttttcaaggggagaccgggctcccataactcttttctggaccgtccttttcctgctgggctctttcggccgtctgaggacacttgctggacataaggccttcaagataatattctctgtgcagtgggcctggt

SEQ ID NO: 7158 - DNA, 399 bp, Triticum aestivum
  Clone ID: LIB104-017-Q1-E1-H9
gggtaacactgttagacgacgatttgactgacgtacgtttcgatgctgaattttcagtatctctctgcatgctcactaaatacgtccacaacagcatgctgacacgcgctatgacgtgttacattatattacatgagtctcgattagtatcatctgtctagaggagtatgattcacttgtcatacactgccatcctgcccattaaggagtagttgatgcaaatatatatgacggcatatgctcgaacgaataaggatgctgacgctaagtaagatgattacacaacttcaaccaattagtactaaatgcagtaacatgcaccaatcatggccaattgatttggacacacacagtgacaaattggtcgaagttgaacatcgacttgactaaaccacatca

SEQ ID NO: 7159 - DNA, 340 bp, Triticum aestivum
  Clone ID: LIB104-018-Q1-E1-A10
gacagccaactggatcgtctgataacccacaagtataggggatcgcaacagttttcgagggtagagtattcaacccaaatttatagattcgacacaaggggagccaaagaatatttgtaagtattagcagctgagttgtcaattcaaccacacctggagattaattatctgcagcaaagtgatcaatagtaaagtagtatgatagttttgatatcagtagcagcagcaatagtaatggtaatagtgatagcagtgattttgtagcaagtgcaacagtaacgatagcagtagtgacttggcaagaacaatatgagagaaattcgtaggcattggatcgatg

SEQ ID NO: 7160 - DNA, 453 bp, Triticum aestivum
  Clone ID: LIB104-018-Q1-E1-A4
cggtcgtagatatccggtcgacgcggccgttatatgatgacgtgggagcatgatttatttattgattgtcttccttatgagtggcggtcggggacgagcgatggtcttttcctaccaatctatccccctaggagcatgcgtgtacacttcgttttgatgattaatacattttcacaataagtacatgagttatttatgactaatgttgagtccatggattatacacactctcaccctccaccattgctagcctcccgtgtaccacttaactttcgccagtaacatacacccaccatatactttcctcaaaacggccaccatacctacctattatggcatttccatagccattccgagatatattgccatgcaactttccaccattccgtttattatgacatgcttcatcattgtcatattgcttttcatgatcatgtagttgatattgtattc

SEQ ID NO: 7161 - DNA, 432 bp, Triticum aestivum
  Clone ID: LIB104-018-Q1-E1-A9
gacggggatggaaaaactgcgtcgactcactaccagcgcctctccgcgatccaaatcctcccgggaaagttcttggttgatctcttcctcctcgaccgcctcccaggttcttggtgtagcttttgccactctcaccaggagatttcatgtctgatcttgacgttcagatcccaactgcctttgacccctttgccgaggcgaatgctggggacgctggtgcagctgccggatcaaaagactacgttcatgtacgcatccagcagcgtaatggtcgcaagagcctgatcactgtccagggtctgaagaacgagttcaactaccgctagattcttcaagaacctcaagaaggaattttggccgccaagggtacagttgtccaagacacagatcttggacaggtcatccaactccagggtgatcagaggaagaacg

SEQ ID NO: 7162 - DNA, 414 bp, Triticum aestivum
  Clone ID: LIB104-018-Q1-E1-B1
ccgggtcgacgcgggatatgtattttgcttggagcgtcttgtatgatattagtattttctttttagtttaccacaatcaacctttctgtacacacctttcgagagaagccccacttgattggaatttattagaatactctatgtgcttcacttatatcttttgagctagatagttattgctctagtgctcacttatatcttttagagcacggctgtggcttaattttgtagaaattgttagtctctcattcttcacttatattattgagagtctcttagaacagcatggtatttgctatggttataaaattggtcctgaatggtaggcatccaagttgggtataataaaacctatcataggaagtgaattggatgctatgatcaatttgatacttgataattgttttgagatat

SEQ ID NO: 7163 - DNA, 332 bp, Triticum aestivum
  Clone ID: LIB104-018-Q1-E1-B10
gggtcgacgggtaaggtaaagattcgatggactatggaataaggagtggcaagagcctaagcttggggattcccaaggcaccccaaggtaatattcaaggacaaccaagagcctaagctttgggatgccctggatggcatcccctctttcgtcttcgttcatcggtaactttacttggagctatatttttattcaccacatgatatgtgttttgcttggagcgtcatgtcattttattttgttttgcttgatgtttgaataaagtaccaatatctgaagttcttaaatgttagagagtctttacatagttgcacaattatttgactagtcat

SEQ ID NO: 7164 - DNA, 336 bp, Triticum aestivum
  Clone ID: LIB104-018-Q1-E1-B11
gacggggcatgaaatagttagtgattgtcttatttatgagtggcggtcggggacgagcgatggtcttttcctaccaatctatccccctaggagcatgtgtgtagtactttgtttcgataactaatagatttttgcaataagtatgtgagttctttatgactaatgttgagtccatggattatacgcactctcacccttcgaccattgctaacctctctagtatcgtgcacctttcgccggtaccatacacccaccatatagcttcctcaaaacaatgaccatacttacctattatggcatttccatagccattccgagatatattgccaatgcaac

SEQ ID NO: 7165 - DNA, 453 bp, Triticum aestivum
  Clone ID: LIB104-018-Q1-E1-B4
cgggtcgaccggtcacggtaactgcgacgagctcattgtatgccaatctcacattgcatggtacgatctatgtaagataaaaacaaataacagacacaatacattagtggaaatagcataaaataacaaaaagaatgtactgtcagaaggttcatataaattgttaccgctgcaaaaacaaaagaaggctggaagtagatgccgaacagcgtggcagtagaaaggctggtccggcaccgtgagttgcagcatccacattgtgcttcctccattctacacagaacgtgttgaactctaagttgaattgtacatagtacaatacacagatcatacatataatacatcatagtgataacctatactggcaatacccaatcaatctattttctatcatctacgtaatacaacaatgccaatgacaatggcaatgcccgtctaatctaaacctgggaa

SEQ ID NO: 7166 - DNA, 343 bp, Triticum aestivum
  Clone ID: LIB104-018-Q1-E1-B9
cgggccgacgggacgatgatcttttcctaccagtctatccccctaggagcatgcgcgcagtactttgttttcaatggcttgtacatttttgcattaagtatatgagttctttatgaccaatgttgagtccatggattatacgcactctcacccttccatcattgctagcctcttcggtatcgtgcattgccctttctcaccttgagagttggtgcaaacttcgccggtgcatccaaaccctgggatacgatagactctatcacacataagcctcattatatcttcctcaaaacagccaccatacctacctatcatggcatttccatagccatttcgaggatat

SEQ ID NO: 7167 - DNA, 325 bp, Triticum aestivum
  Clone ID: LIB104-018-Q1-E1-C11
cccgggtcgacgggaggttcaaccatgtcgtgtccaacgccgtggacatgaagctcagggatgaccttgagaggctcaagaagatcgggaaccatcgtggtctgcgtcactactggggtgtgcgtgtccgcggtcagcacaccaagactaccggcaggagaggaaagactgttggtgtctccaagaagcgataagctgcttcacaaagattcctcatagctttgctactactgtgttggtccatttccagaatcttaagggagtgttcttatttagatgattaccttggctgatgttttgccctagataatgttttggttctgga

SEQ ID NO: 7168 - DNA, 98 bp, Triticum aestivum
  Clone ID: LIB104-018-Q1-E1-C12
gacgggaaattcaccatgatgagtagcacattatcgtcatgcagttcacggatgtccatgtgacgctcgtcagtctcaagcaccatcgtagtctgctt

SEQ ID NO: 7169 - DNA, 414 bp, Triticum aestivum
  Clone ID: LIB104-018-Q1-E1-C2
cgggtcgacgggcaaaacaaatcactggatactttcagcgacgacgttgatgagctgaacttcagagtcaaaggtgcgaaccaacggggacgccggttgcttgggaagtgatatcagagtaggagtcaggctgtgtggaaccactgtgctgcccatgcctttgacagttaattttgactatgctgtggagcctatagtgtgtttctgctgctatattcctatttcataactgttgtttttttggcaaatagtcatattcttgtattgtattgtactgtattgtattcgggtccattgtattagtatgttgatgtttcctgattttccttgggttgtatgacaactaggtcagttactggtgttactccacatagccaccttcttttttggacatgtatgttttgctgctgtaat

SEQ ID NO: 7170 - DNA, 432 bp, Triticum aestivum
  Clone ID: LIB104-018-Q1-E1-C3
gggtcgacgggagcagcggtcaggaccacgggcatggctgggtagtgacatgtgcgtaagcaatgtcgagcgtggcggatgacgccaagatgagattctccatatcgttatttcctctctctctctctctaccaatccttcttgcttcccctctgtctctctcaatgccactatatgcaggttctgacatgtgcttttgtttgatcccggcttgattttttctttggtaagattcaatgatggttgatgcaagcccatgcttctcacaagttggattgaagtttgtcgttcctctatttgtactattgtttccttaccaagtactatcagtactggggtagaaaacacttacctattacatagttctttgctgacagccgaatgtgatgtttgaacggtttcccctatatgcaggaagtacaatttgcatgt

SEQ ID NO: 7171 - DNA, 242 bp, Triticum aestivum
  Clone ID: LIB104-018-Q1-E1-C4
cgggtcgacgcggaggcgagagcgtaacctcagtcaatcgtgggttcgttctcgtggctcggtcaccacagtagtcgtgaaatacatcagctactactgatgtcatcggtgatgtgcatgactaattagtgacaaataatgtggcggaagtcactaatgaactcaatcgactttgataacttagtaccctattcatttacacctgttcatactgttcaagccatacccactaactgttcact

SEQ ID NO: 7172 - DNA, 239 bp, Triticum aestivum
  Clone ID: LIB104-018-Q1-E1-C9
gacgggaaggttaacaagctgattggcctgatagtgaagtggctgaaacccggtgggcatatcttcaccagggagtcctgcttccaccactctggggattcgaagaggaatgtgaacccgactcactactaggagccacggttttacaacaacgtgtctatggaatgccactcctatgaacgtgatgggacttccttcgagccttacccggtactttccatgtgcatttgagtttatgt

SEQ ID NO: 7173 - DNA, 321 bp, Triticum aestivum
  Clone ID: LIB104-018-Q1-E1-D10
acgggacaactagtgtctcggagggcacgttgcgcctcaagtgcttcagtatcacgtcgctgttgttgttgacggagagcatcagtgtcttgcccgtcttggtgttggcatgctcgctcttcctcttattggcatatgcatttccgttcttgtgcttgccaaacgtagcttgattttggcgatgtcgatgttctttctcttcaggttgctcttgtgtagcattgccatgtagagaagtgcactttggttgatggtcttggcatgctgctcgacgtatatgttggtgtgcttgatccagatatggtgttatcggacatgttg

SEQ ID NO: 7174 - DNA, 119 bp, Triticum aestivum
  Clone ID: LIB104-018-Q1-E1-D2
tcgacaggggagttcatggccggctgattccatcctactactgtacctactatacctgtagttcaccagcactgctgctacttcagtagtcatccttgaacactattggtctcaatatt

SEQ ID NO: 7175 - DNA, 422 bp, Triticum aestivum
  Clone ID: LIB104-018-Q1-E1-D3
cgggtcggccgggatgggcacggtaccctggatcgtcaactcagagatctacccgctgcggcaccgcggtgtgtgcggtggcgtggcggcgaccgcgaactgggtgtccaacctcgtagtggcgcagtcgttcctgacgctgacgggggccatcggccccgcgtggacgttcctcatcttcggttgcctgtccgtggcagcgctcgccttcgtgctcgtctgcgtgccggagaccaagggactccccatcgaggacgtggagaagatgctggagaagcgggaggtcaggctcaagttctgggcaccgcgtggccgcggcagcaagaacgacggggtgtgagtgtcatccctaccttctccatttagcgcgcgaacgagacaatttgtggccatccccgtgattggaatttcgatttgtaggc

SEQ ID NO: 7176 - DNA, 327 bp, Triticum aestivum
  Clone ID: LIB104-018-Q1-E1-D4
cctgcattgcatcttccatgatgagaacgagtctgagcaggtcgaggagcaagatcttcatcggctggtgcacgcaccatggcccatcggtatcgatatcggtgtgacagtccttgggcgcacaatcgacatattggagaggaagtgtgatgagcattttgccatccatcaggcagaagactcaaagctgctcggctgcatgattgacgactcacccgaagagtcgccgtcactagtgctcattgagagcctgatgcccctcaaggaatgggcagaggacctctacgattcagtcatgacacagccagcctgcggcttcatcattgc

SEQ ID NO: 7177 - DNA, 80 bp, Triticum aestivum
  Clone ID: LIB104-018-Q1-E1-D7
ttcgcgggtcgacgggataatctagagtgagtcgttgtagattcttctgacatgtttgatcattatgcgatccttgacac

SEQ ID NO: 7178 - DNA, 336 bp, Triticum aestivum
  Clone ID: LIB104-018-Q1-E1-D9
gactgaaactccagcaactcctcttaacacgacgcacctacggatgccttgacgcgtcatcgctagctgctccgtttgcatgttgccaccacgccggctcatcttcgcgaacattgattgagacgagagtcccttagtatgtgcttctccgtctacacaaggttgcacctgcatcgcctgtggtcatcatcgctgacaactacatcgcctcccagcattgtcgccgccaccaccgctcatggtcttggttaatgccaacgggttcttcttcgcagccactagcgctgccatgcgactacatgtggatgactcatgtttaatccgccacatcgagta

SEQ ID NO: 7179 - DNA, 417 bp, Triticum aestivum
  unsure at all n locations
  Clone ID: LIB104-018-Q1-E1-E1
cgggtcgacgcggtcgtgatgtattagtgataatattcgacgatgtactgacgcatgagatgatttacttttgcttattgaatgcatgctaatttgagtcctataagatattgtgaaatgtatatcttgtgttgctcaatatccaagtggccgttcatgtttgcaggttacaccttcgagtggcctatgttttgccggagtgttgattcatttccgttccggcaaatttcaggcgctcgatatgtcctattttagcaaaggtcatgtcggatttttccatgaattttggcatgacttgtgtcagaatatgtaggaaatatcgagtgccctggatttgtttgagtatcttggtagttgtcttcgattgattttcaattaatgttttaactatgaacatangaaatgtctgacgacgag

SEQ ID NO: 7180 - DNA, 70 bp, Triticum aestivum
  Clone ID: LIB104-018-Q1-E1-E12
agtcccgggcagacgggtaagttatacattcttacgaaacgcaaatgggcaataagtactctgccaaaca

SEQ ID NO: 7181 - DNA, 430 bp, Triticum aestivum
  Clone ID: LIB104-018-Q1-E1-E2
cgggtcgacgcggtacaattcaatagttacaatcattgtcgaatcccaagatgtatacaaggtctatagtacttcacaacatgctcaaactcacataatcccagtcaaatgagaatctaaatgcatttcatagttattactttgtaggatgcagcacaaacaaccaagactctacatcagccattatagaagcaacattttgacatatcccattgtgtgaatgaaacgtgcagagagagcttttgaagatggagtatatagggcgggaaagattgtatgtatgtggacgagagagtaggaggcaaaccaaacaagacagaaaaaagcgaaaaagaaggagaaagagataggaaaaagtaaggtctgtgacaaagatggagacatgtaatatacatgattcggtatacgtggaaggagaagagaccacatg

SEQ ID NO: 7182 - DNA, 432 bp, Triticum aestivum
  Clone ID: LIB104-018-Q1-E1-E3
taagtagacttatgcaataagtatatgagttctttatgactaatgtgagtccatggatgtacgcacagtcatccttccactttgctagcctctgttttaccgcgcaactttcgccggtagcatgcacccattacttaccttcctcaaaacagccaccatacctacctattatggcatttccatagccattccgagatatattgccatgcaactttccacaattccgtttattatgacatgctccatcattatcatattgctctttgcatgatcatgtaattgacatagtatttgcggcaaagccaccttcatattcattgcatatcccggtacactgccggaggaattcatatagagtcatatcttgttctagctttgagttgtaattcttaagttgtaaatcaataaaagtgtgatgatcttcataattag

SEQ ID NO: 7183 - DNA, 353 bp, Triticum aestivum
  Clone ID: LIB104-018-Q1-E1-E4
ttagattcatgcaagtgggtggttgtggattgtagagacacttgtgttgaggtttgcaagtcccgtagcatgcacgtatggtaaccgttgtgtgacaaatttgaagcatgaggtgtttctttgattgtcttccttatgagtggcagttggggacgagcgatggtcttttcctaccaatctatccccctacgggcatgcgtagtagtactttgcttcgagggctaataaacttttgcaataagtaaatgagttctttatgactaatgtgagtccatggattatacgcacttttacctttccatcattgctagcctcgtcgggtacgtgcattgccctttctcacctcgagagtt

SEQ ID NO: 7184 - DNA, 408 bp, Triticum aestivum
  unsure at all n locations
  Clone ID: LIB104-018-Q1-E1-E5
ttgacgggtccaacgctaaactttaaaacagacactatttgcttgtgcaccggtccggaacagtccgcggacaatgatacagaaatcggcaatccaaccctgtctttaaacgtttgtccttattttctcttaaatacacaacattcaacataatcatagaaaatggcataattcatacataaataacatgcaaatatccataagggcatctccaacgtaggcctcaaaacgaacaatatacttgcccgtggactggtctggattgattcatggacattggtacgggagccgtccatccgaccatgtcccctagatgtctgcttctgtttctttttttaagttttcgagctcaaaataatagcatagcaaatctgcgatcagagagnatattcagatgggacaattttt

SEQ ID NO: 7185 - DNA, 365 bp, Triticum aestivum
  Clone ID: LIB104-018-Q1-E1-E6
gtcgacgggtgcaccaacttcgcgagctctctctacacatttcattcacacattgggatgtgttcaaaatgttgcttttataatggatcatgaagagttatggttggtttgttgcatcctacaaagtaatagctatgagatgcatttagattttcatttgactgggattatgcgagtttgagcatattgtgaagtactatagacctcgtatacatatcggaattcgacaatgattctaagtactgaattgtagaaaccattacattcagaatcagtaccctaatatatttagttctatccatcacatacacacacattctcatcataagtttgatttccctcaatatctcgcacacacacactct

SEQ ID NO: 7186 - DNA, 323 bp, Triticum aestivum
  Clone ID: LIB104-018-Q1-E1-F10
acggggatacaatcggtttccacttctctcctcacctcgcattctctactcaggctcagatccgatagcccccccgcctccaaccccgctgcgcccaatcggaatgtagctctcccccagtagactagtttaagagcagaagaatatagttaatggttcctggatgagaagtggaaatgctactggctgtggaaggaggaggtttcttctcatcgtcagcttcaggatacagtcatggccttgctcttttgctgcttggacggaaagaagacgagaagcctgtcaaggcatggagtcagtaccgagtagtcgatggggaagct

SEQ ID NO: 7187 - DNA, 321 bp, Triticum aestivum
  Clone ID: LIB104-018-Q1-E1-F11
ccgggtcgacgggtccttgatgttggtgggttcggtaaagtttaccagggagagatcgatgggggcacaactaaggtggctatcaagcgtggcaaccccttgtctgagcagggcatacatgagttccagactgaaattgaaatgctgtcaaagctccgccaccgccatcttgtgtcgctgattggttactgcgaggacaagaatgagatgatcctggtctatgaccacatggcccatggaactctgcgtgagcacctatacaagacccagaatgcgccgcttagctggaggcagcgtttggagatctgcattggtgcagcc

SEQ ID NO: 7188 - DNA, 89 bp, Triticum aestivum
  Clone ID: LIB104-018-Q1-E1-F12
gagcatggcatatactttgtttgtatagttaatagacttatgcaatatgtatgtgagttctttatgactgatgttgagtacatggacta

SEQ ID NO: 7189 - DNA, 424 bp, Triticum aestivum
  unsure at all n locations
  Clone ID: LIB104-018-Q1-E1-F2
cgggtcggccgggtgacggctcaagagcggacggacgcggtgcctccggcgacaagtccgacgacgacgaatgacctccgtaagatactgctgactgcaacatgaacacgaaccgtcggaggagccgtagtccagttgaagtccacgatgaccactctaaagggagtgacggttatggacggaaagagaacatgagagatctacagaatgatagtcatgccagaccaggcagaggtcatgaacttgtcaggcattctgatatgcatgcctatggggcttcacgtgaatccangatgcatgatgattataggacgtaccatgatgtacgtgctgatgatgaaaggagccctccttagaacttcccggccaaatcgggagtcaagggctgacacttactatgattcctcaaaccgtgatggcacat

SEQ ID NO: 7190 - DNA, 411 bp, Triticum aestivum
  Clone ID: LIB104-018-Q1-E1-F3
cgggtcgaccggggtagagatcgcaacatagtctatcaattcaatgcccggggcagaaatacaaatggtagaggagggcagcgcactgggcgcggtcacaattcggtctaccgtcaggttgatgttggaggaggcaaaactttaaaccgcaagatactgagacagtgatcaagaagcgacagagtgaggagaatgattcttcagggtccaaagatgatagccgtgactcaaagaagaaacaggcagagaaggatgttgctaagactctggcggaggctgagcatcagccccgcggatcacaatgaatttcttttcatggaacaatcgcgggcttgggaacccggagacagttcgagaacttcatagccttatgaagatggaagggcccgccttggtcttcatgtgtgaaac

SEQ ID NO: 7191 - DNA, 434 bp, Triticum aestivum
  Clone ID: LIB104-018-Q1-E1-F4
ccggtcgaccgggttgtcaaaataaagacgtgtgactgcacctgtcgaaagtggaatatttctgggttgccatgcatgcatgcaattgcagtatttgagcgcactgggaggtatgcatatgacttctgtgtggagtatttcacgacgaaacggtaccgctcgacctattcaatgtccataaatccgatacctgatgttaccttaacggacaattctcagagtccagcgacattaccattctcaattcaaactcgtcgacgggttggcaggccgaaagagaaacagctgatccgcccatcacaattaacatggcagtgccctgcagcagatgtaaaagttatggtcacatcaaagcaacttgcaaaattcctatcagtggcgaagcccttccgccttgccaccagctgagctcttcgatgtacacagtaaggtgg

SEQ ID NO: 7192 - DNA, 351 bp, Triticum aestivum
  Clone ID: LIB104-018-Q1-E1-F5
gacgggtaaaacaattccttcacataccggacacgttctctctcgatagccatatactacctcggagatggtgtagtttacaagcgacctctagtcagtcttctgcgacacatgcgcaacatttcaccacaccctacaaggaccatacgactatactgtgccaggtcccgagtatttccagcatcatgtgatttttgtttgattttaacggctggatccggcatgccgccaaggtacattcacctccctggggtggggcatgcccctccttgggttgcactaggcctactcatagctcaaatacatcatatatgatttgacaaacgacctctggacatcatttcaggtggc

SEQ ID NO: 7193 - DNA, 181 bp, Triticum aestivum
  Clone ID: LIB104-018-Q1-E1-F8
acaggctagattagcacatggtatagggggtcgtgtatagtttttgttgttctagcctttgatctgatttaacaactaggcttgggagtctagtgcgggatcatctgagttcgctcccgtgggaaatcaactccggagtcacgtctcggatgcatctgactgattttagatgggagagaat

SEQ ID NO: 7194 - DNA, 320 bp, Triticum aestivum
  Clone ID: LIB104-018-Q1-E1-F9
acgggacaaccaaaagcctaagcttggggatgccccggaaggcatcgcctctttcgtcttcgtctatcggtaactttacttgaagctatatttttattcaccacatgagatgtgtttttcttggagtgtattgtatgatttgagtctttgatttttagtttaccacaatcatccttgctgtacacaccttttgggagagacacgcatgaatcggaatttattagaatactctatgtgcttcacttatatcctttgagctagacattagtgctctagtgcttcacttatatctttttagagcatggcagtggttttatttt

SEQ ID NO: 7195 - DNA, 304 bp, Triticum aestivum
  Clone ID: LIB104-018-Q1-E1-G10
gacgggaacatcaacttttctgaccgtttggagctgcggcctaaaccttcctgtaatccctggagcttcgtcagagccttttccttccccacaggccagagctcaatttaccttcgccagagctctaagataaggagaatcagctcaggataaaagggctcgcactcaattgatccgggtcaacacttcctgtatctggtttcggcttggttttgactccttgtaggggctcatgacagtcctgtaggggatacaaaagctttccgagcagtagcggcagctgggcgggagagttggttattca

SEQ ID NO: 7196 - DNA, 305 bp, Triticum aestivum
  Clone ID: LIB104-018-Q1-E1-G12
acgggacagggatcgaatacctgcagcacgagaatttcatggaatgagcagtcagttagtcaaggcaatgccgagtcttagttttacaaaagtccaggaagacaattgtacttcgtcaacatgtgccatttgcttggaagactacagtgttggtgaaaagataagggtgctgccttgtcgtcacaagttccatgctgcttgcgtggacctgtggctcagatcatggaggacattctgccctgtatgcaagcgagatgcacatgctggaatgtcaaatttccctccatcagagtctacgcctttgc

SEQ ID NO: 7197 - DNA, 78 bp, Triticum aestivum
  Clone ID: LIB104-018-Q1-E1-G2
ggagtctcgaggagcccacgagatagggggtgtacgtaggtttctgttgctctagcggttcgtcagggcgagcagata

SEQ ID NO: 7198 - DNA, 244 bp, Triticum aestivum
  Clone ID: LIB104-018-Q1-E1-G4
gggctacgagaggacgacgagatcaacatagtgctgcggcgttgatggctgggctagctccatggtcaagcggctcgctgcattcttttccagaggttgtatatgtagaatatcagaaggagcacacatgggaagataggtcaacaggattgtggccgcccttccacagtccgatgctgattccttcttttaagactcgggaatctgaaataccaccgagaatgttttccgtttcctgtagttc

SEQ ID NO: 7199 - DNA, 432 bp, Triticum aestivum
  Clone ID: LIB104-018-Q1-E1-G5
attccgggtcgacgggttcgcttataagccatgaatcttcacaaattatagctcgtttctaagaacactttttttaaataattcccgtattacaagtttattatttttcctggaaacttggtcacatatgatgacacaatgtgaaggttttccaattttttgaattttttatgcccgtttcaaaatgcggtcaaaacggcgggcttgaccgttcctagctagtggttgaatcttggaaaaaattggatgtttctcttattaaatagatacttatgtacctagaaatgatttttggaaaaaataaatagcaaactatgaggcagctacagttcaaatttgacccgcttcctactgaatcggccgaaatttgtcttttcaccagagatggaccaaagcttttgacacccaaccattttgttaaatgtgcaataa

SEQ ID NO: 7200 - DNA, 316 bp, Triticum aestivum
  Clone ID: LIB104-018-Q1-E1-G6
gacgggtcatactatattaagtctttcaagaattgcatcattgaccaatgctatgcttgtcaacttttaataaattttactatttgtacttttccgtatgtgatgtcattacttaccataagattagcctatgatatttctcattattttcttttagttggttgacataagaaagtatagaagcacaaactcatactaagccttattatataactctcactcgattacatagatagatagatcacgagactaagacttgacaatagatcagactaagcctttattcaacttgtgatgatcatcattattcattatt

SEQ ID NO: 7201 - DNA, 236 bp, Triticum aestivum
  Clone ID: LIB104-018-Q1-E1-G8
cgggatacgccagtggaacttttggcaatcgtggtggccttgtccctgcgcggtcgccgcatttgacgtccagtacatcatcgactagtgatgtcaccgttgatctgtatgaataacttgtgtcaaataatacgggggaaatgactagtgaagtcaaacgacctgtaacttgttactctaatcttttgcacatgtacatgctaatcatgccataaacacgaactgttcgcttcaga

SEQ ID NO: 7202 - DNA, 282 bp, Triticum aestivum
  Clone ID: LIB104-018-Q1-E1-G9
gacggggagacggtacccgggaccctgaactacaacaagcaacatagcgtggacatgcacctgctgtcccctcaggtacagaatcctgtatatggctggtaagacagaaccactgctgttagtactacatagataggcctgtaatttgtgacactaattctttttcctcctctccctgatgccaacggcaaagccttgttcattattaccaatacgaactacagactgcttgtagcactagataacacttgtgtattcgatatttcgatcccttgagttttg

SEQ ID NO: 7203 - DNA, 433 bp, Triticum aestivum
  Clone ID: LIB104-018-Q1-E1-H1
cgggtcgaccgggcacacacagaatatatcatctcttatgactctgatgatctatatccaggaagtaattcaggtgttggaaagctgagatcggacttcctggggacaaagttcgtcatgtacgacaatcagaaaccatacgacggcgccaagtccttgaagagccgatcaagtcgccgctttgcgagcaaacaaatcagcccacacgtttcaggcgataatcttgaagttggacaggtgtcatacaggttcaacttcctcaaatcaagagggccgagaagaatgcactgcagtatccagtgccccgtaggtcagggcaccgcatccgatccatccaaggagaagccaccgagcaactccagctccttgtctctaaaaaacaaagcgcctcggtggcacgaacacctgcagtgctgggtgcttgaattttcac

SEQ ID NO: 7204 - DNA, 303 bp, Triticum aestivum
  Clone ID: LIB104-018-Q1-E1-H10
acggggactccatctttgacatgggcttcccaccttacacgggaggggtcatgttatggggatattccatcggcgcaaaatacatccacggcaagttgcatgagtgtgcgaagcggtacggcagcttcttcgagccttgctcctacctcgccgaaagagcatcaaaggggattcctctgagtgcattagcatcaactcaagtcaagtcgcggctatatgtgattgtaggcctggtacttctgtcagctgaatgaaattatgccaccgagttatactgcgcgatgaaggttgtgaactggtgag

SEQ ID NO: 7205 - DNA, 265 bp, Triticum aestivum
  Clone ID: LIB104-018-Q1-E1-H11
acggggatgacaacggtgagagagagatagagcacggcagtgggaaactagctgtgtagggctcagccgtgggaagctatctatgtagggcacggtggcattgagatcccattcggcttcgtgctccatctctgcctcacgcttccgctaccattcgcagatgcagatcccggcgcgtgtgcacatgtccgtcgtcgtcggtctgctctgcccggcgggcgttgataggagcgttactcatccacggatgagccgtattcatccg

SEQ ID NO: 7206 - DNA, 217 bp, Triticum aestivum
  Clone ID: LIB104-018-Q1-E1-H2
tggaaaatagaataccagaaaaggtcagtggtgttttggagggcgcctcgtctgtatgtattccatctgtgtaagttaattcatttgggtgattggttcggctgtaggcggtatatctcaatacagtgggggatttgtaatgtttctggttttgtgttccttgtgagatgaaataataacttaacttgtttataacatgctcctcaattttcttctt

SEQ ID NO: 7207 - DNA, 356 bp, Triticum aestivum
  Clone ID: LIB104-018-Q1-E1-H3
cgggtcgaccggtacgacgacgaagaagagtagattggtgggtgtctcaagatatctgcacttccagatgtgctccctttaaagcagtatctgttgtcttcccaatattgttgactagaaagtaagtagggcaacaagtatgagaatttaacttggctgtgttttcaaaagaagctggcgcacctgaaagctgattttgcatgtttttccccatgcatgtatgtaagcttccaataaggaaccaacccatgatcttattggtgatagcattatcatcactaggtaaggtttatgatgtggtgcttatttgctttgtcagaatgaatccattgtgaaagagatttgcaaaacaaaaa

SEQ ID NO: 7208 - DNA, 385 bp, Triticum aestivum
  Clone ID: LIB104-018-Q1-E1-H4
gcccttagtggaggggtccgaaatcaaccctatctcttgtttccccacacatacggactctaaaaatagcctatacttatgtatttcgaaattacatgggcctggcccaataataaggcgacgcagcacctaaaatagcctcagaacgaaatttatgaagtggcatgatgaggacatgactaccttggatatgaccaaaaatattgcatatatgcatatttgtcaggtgatttctagtgcaaactattcaataatctatttatgttatccagaacaaaaatacttcacacacttttgtgttttgtctaattgcaggtgtatgggacatttgtacaatccacatatgaagataaggaaccacgaaattttaatttccgtccaaaaa

SEQ ID NO: 7209 - DNA, 384 bp, Triticum aestivum
  Clone ID: LIB104-018-Q1-E1-H5
cgggcgtaatcagtatttccgggtgcactcatcgaccactgagttaggattgtgacaatcgctcgctccttgatcatatcgtattgccctgaaaagcaagattgttctcgagcttaataacagatcggtggtttgtgattttccggatatcttctctggaagtgttactatgttgtcagctgaccgctatgttgagttcgtgatcaagttggatttcctccaaaccacccttctccgtctgtcctgcttggtttgctcgtcgtcttagagggtgtgcgtgtgttcatgttggagtgtgatgtctgggcgcgtgcgtgtgtgtatgtataggtctcggtggtgtgggaggtgtccagtacgtgcgccagagtgccattccttgtg

SEQ ID NO: 7210 - DNA, 247 bp, Triticum aestivum
  Clone ID: LIB104-018-Q1-E1-H6
gtgaattcagtcttaactgatgtatcagcagatagatcgactccacaattatcctatacttatgtatttcgaagttacattggtctggaccataagtaaggcaacgcagcatgtaagttaccgtgagaatgatctttatgtgagtggcatgttgatgatatgactatcttggatatgaccaataatattgcatttctgcctatttgtcaggtgatttctattgcgcacgattcgatactctatttat

SEQ ID NO: 7211 - DNA, 322 bp, Triticum aestivum
  Clone ID: LIB104-018-Q1-E1-H7
ttcccgtcgacgggtgacatcactacagctattgacacccatgttgtacccactgaagaagtatccaatgatgactcattatctacacgcattctcaatgaaactacccttcaactatacacatttattgcaacatcaactcatataatcatctacatgtacataaaaacgatcaaaacacaattcataatgataataatgagaatgattagatctacattaaatattgctaatgctcatatatggacattgccacgatcagaaaagataataataccgatagcaaacataatgataaaaatacctccaacgagactggacc

SEQ ID NO: 7212 - DNA, 348 bp, Triticum aestivum
  Clone ID: LIB104-018-Q1-E1-H8
gtgacacaacggcagggaagactcggcagttgtttcgcacgcggaggggagtacgactgtacgagggtttactggttcgtctgctgtcgccggagaataacagcaggtgtgggtgagtagagggatggctaggcctgcgatgggagtacggtggggcggtgaggcctgcgcggcagcagagccggccgtggggaggagggagcaggcagtcctgccggcgcttgtttgagcggttggagcaggaagagcagagatagaagaagcatgacggccgttggatggacatccaacagtcagtgcttgtgcctcaacctttttttaggaaagcctcaaatccatggaaaacag

SEQ ID NO: 7213 - DNA, 233 bp, Triticum aestivum
  Clone ID: LIB104-018-Q1-E1-H9
acgggtaacactatcatctgactcgtatcagggttggtagattttttgttcctggaattcgccatcgaatttcggttttcttatgcaatgtgccaatgttgactatcccgttcaactgttcggcggtgacctgggaccgtagctcaattgcaagcggcactctgtttggtgattttgaagtaaatgctggtacaacagatgccggtttattaatcattcagtaggggtataca

SEQ ID NO: 7214 - DNA, 448 bp, Triticum aestivum
  Clone ID: LIB104-019-Q1-E1-A4
cggtcctagaatcccgggtcgacccgagactccaacactgctcatttcatgtctttgccattgtagccggccatgaactacaacacattggcgggctcgctcacatgcaatgacggcggccgacccattgtacacaacaacgtctaggcatctccacgacacgtgcgaccgcctgtgttttgctttagacccgatggcacacctgataacaaattctttccaccacgacaagcaatcatacttggttttctccgatcgttttatgatgagacacaagtacatgggcttaagcaccttagattgattcttctcggtgtagttgtgtacgtatacaaaacctaatcacatatgtatacaaaacaccctgatcctttagattaaacatttcctttggctacacatcacgtccacatgagactatatttaatggcaataaggtgttggtcct

SEQ ID NO: 7215 - DNA, 393 bp, Triticum aestivum
  Clone ID: LIB104-019-Q1-E1-A7
attcgcgggccgacgggaccatttaccgggaccctctcaactttcttgcacatgctctgtggatgaaatgatgataccatgccaactttcaaccttttcagagttcattttgaaatgctttccaatttaagggcctaaaaccccaaattaatataaaatgcacggaaaataacaaatgaagtcacaaagtattgaaaattgatgatgtggctttgaatggtgcattttgaacacacaaaaagtcacgagttcaaataagttttaaaaaatcaaatccctatgtaacagacgagtttccgtatgaaatcctgatactttgaaagagattgtccgttttgtacacgaagtgcatccaccttttgccgggagcctctcaactttcttgcacatgct

SEQ ID NO: 7216 - DNA, 394 bp, Triticum aestivum
  Clone ID: LIB104-019-Q1-E1-A9
gggtcgacgggggaaagcgacgagcatagtgcgccgtgcactgtatcgctggccagaccatgcccgtgctctctacggcgagctccggcgtcggtgagcgccagggggaagttaagggggtggagacgacgatggtggcgaagcatggcatgcttgggccggttgggtaaccagcacgcgctcaacagagcactacgcggcacacagagcgcgtgttttgcatgccagcacaccgggacgaacgtggtcaccgcgtgaaccgtgacatcaggccaccctaagcgctaacctttatgtctggcgtgtagtccttagtagtttgaagtgttaccatggtttggcttggatccaggtgcagttgaaatagatttgtactgctggcaagtttctgggc

SEQ ID NO: 7217 - DNA, 417 bp, Triticum aestivum
  Clone ID: LIB104-019-Q1-E1-B1
gggtcgacgggatatggtgatattagagtcgtgctagttgagtaattgtgaaattgagaaatacttttgttgaggtttgcaagtcccgtagcatgcacgtatggtgaaccgttatgtaacgaagtcggagcatcaggtgtttattgattgtcttccttatgagtggcggtcggggacgagcgatggtcttttcctaccaatctatccccctaggagcatgcgtgtagtactttgttttgatgactaatagatttttgcaataagtatgtgagttctttatgactaatgttgagtccatggattatacgcactctcacccttccatcattgctagccttttcggtaccgtgcattagcctttctcacctcgagagttggtgcaaacttcgccggtgcatccaaacccgtgatatgata

SEQ ID NO: 7218 - DNA, 366 bp, Triticum aestivum
  Clone ID: LIB104-019-Q1-E1-B5
gggccgacactggaaccaacagtggtgcagagattagcgagatatggggtctgacggcgccgcgccaccgattctcgctataccaccaccatcggggtcaagccatcagaaaaggattgaagggcatgagattgggtcggtcaggtgtccagcgtgtagcacattgtgtggtttcctatatgatgatgcgattggttgattgattctgcctgggttggttggttggctggtgttgtatactgtcctctggttatacaggtctgctcaaagtgtagcgtgactgagtcgagcggtaagaattgaattgcgatgggaggaactctgtttttgtcgagtcggaaaaggcggtgcgggtgcgcgccttgt

SEQ ID NO: 7219 - DNA, 428 bp, Triticum aestivum
  Clone ID: LIB104-019-Q1-E1-B7
cattcgcgggtcgacggggacgcagaagatcgtgatcccgccgggcaacttcttggtgggcgcgctggagctgtcaggcccctgcacctcctccatcatcatccggctggacggcaacctcctcggcaccggcgacctcaccgcctacaagaagaactggatcgaggtgatgcgcgtggacaacttcaccatcaacggccacggcaccatcgacggccagggccccctcgtgtgggagaagaaccagtgcagcaagcactacgactgcaagatcctccccaacagcctggtgctggactacgtgaacaacgcgacgatccggggcatcacgctcaagaacgccaagttcttccacctcaacctcttcaagtgcaagacggtgctggtggagaacgtggagatcacggcgccggggaacagccccaaca

SEQ ID NO: 7220 - DNA, 363 bp, Triticum aestivum
  Clone ID: LIB104-019-Q1-E1-C10
ttcgcgggtccacggggccttcgtagacgtgccgaccatgctccacaccaacgacatcaacatcggcgaccaactggaggttatcatcaacaggcggcatattaacatgatgcagcacatgctctagctcaagtattcgcaccttatctcgatctccgccttcaaaaacccctgcgccaattccatcatactccaggcacctgtctctctgacacagtctgcactcgatgatgattatctacgtagattaaggcatcgacgtatacccaaggatcgtattcgacgactacatgttcctgtacatgcgccaaatctacgaggccaaagttacactgttcacagccaagtacgtaaatgccgcat

SEQ ID NO: 7221 - DNA, 293 bp, Triticum aestivum
  Clone ID: LIB104-019-Q1-E1-C11
acggggctaacgtagacgtgtcgaccaagttctacaccatcgtcatcaacatcggtaaccaactggaagttatcatcaacaggctgtatatataacatgttgcattacatgctctagctcaagtattccaaccttatctcgatctccgcattcaaaaaaccctgcgacaattccatcatattccaggcaccttgtgctcctgagcacttctgcactccagatatgatttacgtatattaaggcatcgacgtataaccaaggatcgtattcgccgaatacatgattcctgtaca

SEQ ID NO: 7222 - DNA, 202 bp, Triticum aestivum
  unsure at all n locations
  Clone ID: LIB104-019-Q1-E1-C2
gggtcgacggngatgttgagaagctgattggcacgatagtgaagtggctgaagcccggtgggcatattttcatcagggaatcatgcttccaccagtctggggattccaacaggaaactgaacccgacgcactaccgggagccgaggttctacaccaaagtgtttaaagaatgccactcccatgaccaacaggggaattcctt

SEQ ID NO: 7223 - DNA, 434 bp, Triticum aestivum
  unsure at all n locations
  Clone ID: LIB104-019-Q1-E1-D3
ccgggtcgacattcctggaaaggagctggctattacttcagatgaggctttaagtttggaggagctaccgaaacgtgctgtgattcttggtggcggatatattgctgttgaatttgcttctatctggaaggggttgggtgctgaagtagatctattttataggaaagaacttcctctaaggggttttgatgatgagatgagaacagttgttgcaagtaaccttgaacgaaggggaatccgattgcatccagggacaaatttgaccgagttgagtaaaacagccgatggcattaaagttgtgacagataagggggatgagctcattgcagatgttgttctttttgctacaggtcgtgcgccgaactccaataggctgaacctggaagctgttggtgttgacgttgatcaaatangagccatcaaggttgatgaat

SEQ ID NO: 7224 - DNA, 435 bp, Triticum aestivum
  Clone ID: LIB104-019-Q1-E1-E3
cgggtcgacgggatggtctattactaccaatatatccccctaggagcatgtgcgtagtactttggtttttgatgacttctaaatttttgcaacaagtacatgagttcttttgactaatgttgagtccatggattatacgcaccctttcacccttccatcattgctagcctttcttgtgccgcacaactttcgccggtaccatacacctaccatataccttcctcaaaacatccatcatacctacctattatggcatttccatagccattccgagatatattttcatgcaactttccaccatgtcgttcatatgacacgcattacttttgtcacattgctctttgcatgatcatgtagttgacattgtatttgtggcaaggccaccttcataattttcatacatgtcgctcttgattcattgcatatcccggtaca

SEQ ID NO: 7225 - DNA, 317 bp, Triticum aestivum
  Clone ID: LIB104-019-Q1-E1-E4
tcaatgtaacccgtgaagaacatgtgtgtcttaacttcactatgggagacagtatctagccatgcattttgatgacttgtatcggccattcactattgcatctccggcatatacattatcattcttcaccactgtcgtctctcttattgcgtttgtagagcacactttccacgttcaagctttccattaccatctacaccaataaatgtaacaccaatagtacttgaacagttaatccatgttcaatacgacttctaaattaactgtgcacatctttggggtatactgagaacctccttgtgaagcagcattatgta

SEQ ID NO: 7226 - DNA, 438 bp, Triticum aestivum
  Clone ID: LIB104-019-Q1-E1-E5
attcgcgggtcgacggggaccctgaagtagtagcagcagctccatcaccatctcccccctgcttccttcctcggatcggagggggagagcgaccggccgaccaggaggaagcggcggcaggatgagtctcttcggcctcggacggaatcagaagacgttccgtcccaagaaaagtgctccatcaggcagcaagggggcacagctccgaaagcacatagatgcaaccctcggtagtggaaaccttagggaagctgtgaggctgcctcctggagaggatatcaatgaatggcttgctgttaacactgtggacttctttaatcaagttaacctgctgtatggcacactcacagagttctgcacatccgaaagctgcccaacaatgactgcaggcctaaagtatgagtaccgatgggctgatggtgtacagataaagaagcc

SEQ ID NO: 7227 - DNA, 438 bp, Triticum aestivum
  Clone ID: LIB104-019-Q1-E1-E7
attcgcgggtcgacgggctatggaatatggaatcatgagtggcatgagcctagcattggggatgcccaaggcaccccaaggtaatattcaaggataaccaacagactactattggggatgccccggatggcatcacctctttcgtcttcattcatcggtaagtttacttggagctacatttttattcaccacatgatatctgttttgcttggaccgtcattttattttgttttatgcttgctgtttgaataaaataccatgatcttaaattcttatatgttagagagtcttcacatacttacataattattcgactactcattgagcttcacttatagttttctgagtagtttgtcgtttgctctagtgcctcacttatatcttcttacagaatggccgtggttttaattcatataaatcgatgaactctcatgcttc

SEQ ID NO: 7228 - DNA, 315 bp, Triticum aestivum
  Clone ID: LIB104-019-Q1-E1-E9
acgggacagtaggaagcagagacagcagctgagcggttgtgatggacctggttttgacatatttttgccctggactattaattttgcttgctcctccctttgtctggttccaaactgtctgtggaattgacttgattagtcagctttgaaatggtatacgtggcacgtgcacagcacaatgcaattttccaaactaaatataatatttatgtcctgatggaatgtcaagtctgctctattgtatgatatgaacctaggactgtatcttattgggaattaagagtcacggagccaaaattgtactctgtttcgagc

SEQ ID NO: 7229 - DNA, 407 bp, Triticum aestivum
  unsure at all n locations
  Clone ID: LIB104-019-Q1-E1-F2
cggtcctagaatcccgggtcgacggggggcgcaagtgaaataccactacttttaacgttattttacttattccgtgggtcggaagcggggttcacatcatcctgcgtaccgcataacgagaatgaaccccacgccctcaccatcacaacaacctgatgttatttagcccttttccttcttccagggcctgcagctcttctcattccggcagcctgaaacttgagtgaataaaatgtcttgtatcgtctaaccgttttgctacggccatttgagatggttgatacatacttacatcacgggtcaatgtatgagcttatgatgtcttgatcaggacatgttttctgtgtgtcattccatttgtgataaatcatttcaaatgaatgttgtatgcaccatggancaagctc

SEQ ID NO: 7230 - DNA, 251 bp, Triticum aestivum
  Clone ID: LIB104-019-Q1-E1-F3
acggtcaaatattccgggtcgacgggcgtacaaagtttaccggagatcggggtgatatagattgttaggtccgcagtttgccactttgtaatgttcctccctacatagcgctgtcatgccatgtgtcatgtgtgccttgctctcagcagggaagttgagttgttgtatgttgtgtagcagaacgatgctttctgcctgtgaatgtaaaacataagattgcctaaaaaaaatcaatcaaaaagaaaacaaaa

SEQ ID NO: 7231 - DNA, 436 bp, Triticum aestivum
  Clone ID: LIB104-019-Q1-E1-F6
attcgccggtcgacgggagtatcaattgggcttgtctggacttcttttggtggggaagttcagtttgtagaggctacagccatggtgggtaagggtgacttgcatctgacaggacaacttggcgatgtaattaaggaatcagcacagttagctctgacatgggtgagagcaagatctgctgaccttaatctgtcacccacttctgatattaacatattggagagccgtgatatccacatacattttcctgctggtgctgtgccgaatgatggtccttctgcaggagtgacactggtaacatcactggtgtcattgtttagtaaccgaaaagtcagagcagacactgcaatgaccggagagatgactcttaagggcctactgttgccagttggtggagttaacgataacgtgcttgctgcacatcgatatggcatca

SEQ ID NO: 7232 - DNA, 371 bp, Triticum aestivum
  Clone ID: LIB104-019-Q1-E1-F8
attcgccggtcgacgggagacatgatcgcacgtagtgatgttgctataaccagtgacagtaagtagcagtttgctcgcggtacatctcaacagtagcaatttgaaccttgtcatgaatgtcacaaagtcagcgtcgagttgcgtcactgggacaatatcaactactcacatttgggaatcatagacttggaactaatgcagatcataaattacgatgtgtcgcgcatacgttgtgaatgtccatcagcttgaatatgatgctgtggaaggcctaccaagtgtgcctgacatcaaatcgactattggtgtgattaacatctatcccggctcatgtaccagcagtttataacatttagttaccatatgttttt

SEQ ID NO: 7233 - DNA, 356 bp, Triticum aestivum
  Clone ID: LIB104-019-Q1-E1-G11
ttccgggtcgacggggtccacatacatgacatactatgttaccatgatatcataccgtgcacataggtggaaactgacacagcactgaatgttgcctcaggaaattttcaattgcgttgaaacagacaggacagttctcatttttcacgaccacaaaatgaagttttatgtaaatgacctatcaaatacatgttgtaacatagcatcagatcattttcacacactatgaagacatatctaacgcatatatgacaacatggttgggtgttatcgaatatgatccaacgctagatgtaaacagaagattgagtcagttcattaggaatagagacacattttaactacatccgcctcac

SEQ ID NO: 7234 - DNA, 430 bp, Triticum aestivum
  Clone ID: LIB104-019-Q1-E1-G2
tcccgggtcgacatcgacttcgacttcttcgtcggtgctcgaagctcgccgccaacgattcaccgcctcctgcagctactaaactccaccggcatttcttgcgcctcacggtgagctcccggtcggaaaccctctcctctagacttggttcgttgtttcctgctgatactaccatcgccaccgaagctctgtcgtcgtcgtcgagctcgtcaccgtcagtatcgtgtactctagggccaggcaagcacgtcaacgtgctcgtggcgtccctgtggtaccgcctgagccgtttgtttgatcattctccccgcgtatccccgtatccgttgagctcttgctccggccgccgcttgccgtcattgcttcggccaactccggccatctctgctcgtgtcgttgatttcgttcaacgcgcgacgtcccgcccgat

SEQ ID NO: 7235 - DNA, 368 bp, Triticum aestivum
  Clone ID: LIB104-019-Q1-E1-G3
ccgggtcgacgggtacccaaaaacttgaaaacttcacagaacaaaacttaacagaaaatctcatgagctccgttagtataagaaaacaaaccaccactttaaggtactttaatgaaatcattctttatttgtattggtgttaaacctactgtattccaacttctctatggttcgtaccccccgatactactcatagattcattaaaataagcaaacaacacacgaaaaacagaatctgtcaaaacagaacagtctgtagcaatctgattcatacaaatacttctgtaactccaaaaattctgaaaaacataggacgacctatataatttttttaatgatttactgcagttggaatcagtattttatct

SEQ ID NO: 7236 - DNA, 432 bp, Triticum aestivum
  unsure at all n locations
  Clone ID: LIB104-019-Q1-E1-G8
ggccgacggggtgaagaaggagaacgacaacatgcagatcgagctcaggcatatgaaaggcgaggatgtgaactccctgcagcccaaggagctgatcgccatcgaggaggcgctcaccaacggccagaccaacctcagggacaagatgatggaccactggaagatgcacaggaggaatgagaagatgctggaggaggagcacaagctgctggctttgaggatgcaccagcaggacgacctgagcagcggcatgagggagatggagctcgggtaccatcagggtanggatttcacttcccagatgccgttcaccttccggctgcagcccagccaccccaacttgcangaagacaagtaggccatcgaatcctgccgtggcctgtgtgaactgaagctcctctacctgcaggccacaactgctagcttcaattt

SEQ ID NO: 7237 - DNA, 433 bp, Triticum aestivum
  Clone ID: LIB104-019-Q1-E1-H12
gctcgacgaacagatccgtgatcatggcaggctcgtcagctgggcaccgcaagtggaggtgctcgcccaccctgctgtaggcgccttcatcacgcacagcggctggaactccacggtggaagccgtgtcggacggcgtgccgatgatatgcctctcgttgcacggagaccagttcagcaacgccaggtacgtgtgcgatgtctggaaggtcggagtggagatcgaggcgtcgtctgctgctgggcagaacctggagagagggaagatcaaggctgccatcgacaagattgtgcacgacaaagggattagagagaggatggatgccttcaaattaactgcagatgaagcagttaactcccaaactgaggtgaaagctttggttgatctcataaactcgttttaattaattcagaaccttccacttcagatacct

SEQ ID NO: 7238 - DNA, 434 bp, Triticum aestivum
  unsure at all n locations
  Clone ID: LIB104-019-Q1-E1-H4
ggtcgacggggatgttgaaaccatccggtaaagaaggtctttgaagcgtttgaaaaggcggacgtccggttagggaagtcaaaacccacaggcaacattggaacggtattgcattccttcatcatcaagtgccctggctccaaacagcaaacgagagagaaagtgatcgctgcaatgtctcgcgccatgagctcagtgtanagtcggttgangggagtcggtgcagtagaggttggttactctgctggtggcatccaagtagcaagcagcccctgaaaccttccattctgttgatagaagttgtaggtcgagacagcaagctgagatttctgacttagcaatgcaagaaaagcacaagctaaaccgccattgttgtaacggtaggttcttgtgctccttgtagttttgatgtttttttgggaagaaatacatgc

SEQ ID NO: 7239 - DNA, 401 bp, Triticum aestivum
  Clone ID: LIB104-019-Q1-E1-H6
ggtcgacgggggagaaagcctgccgccgtgtcgtccggagaggacgcgggtgccgatccgttttttttgggagagcagtttccgtgattctgcttgtgcgaaaaaatagaaatgaatgtatttaaaactaaaatacgtctagatacatctatttctccgatggctaacactccacttcatgatacatggactcgtgtttttaagaaaataaaaaagagtagcaaataatccggcgtgacgagacggagggcgagcgtatggccgacaacttggctgctcttttgaggaagggacgatggtgtccagacagcggttgcttgggagcttgcaaggctcgtgtttggctcctacgccgagttcagtgccctgcaggttcaaggtaactctgacatccttgcacg

SEQ ID NO: 7240 - DNA, 360 bp, Triticum aestivum
  Clone ID: LIB104-019-Q1-E1-H8
ggaagttgagaagctgattggcaggatagtgaagtggctgaagcccggtgggcatattttcatcagggaatcgtgcttccaccagtctggggattccaagaggaaagtgaacccgacgcactaccgggagccgaggttctacaccaaggtgtttaaggaatgccactcctatgaccaagaggggaattcctttgagctttctctggtaacttccaagtgcattggagcttatgtgaaaagcaagaagaaccagaaccagatatgttggctgtgggagaaggtcaagtgcacagaagacaaaggctttcagagattcctggacaatgtgcagtacaaatccactggaatcttgcgttatga

SEQ ID NO: 7241 - DNA, 462 bp, Triticum aestivum
  unsure at all n locations
  Clone ID: LIB104-020-Q1-E1-A4
ccacgacaaggtcgtcaaggcccagatctgggacacggcaggccaggagaggtatcgggcaattacaagtgcgtactatcgaggggccgtcggtgcgcttgtcgtgtacgatgtgacacgccatgtgacctttgagaacgtggagaggtggttgaaggagctccgggatcacacagatgcaaacattgtcatcatgcttgtcggcaacaaagctgatctccgccatcttagggctgtatcagtggaggatgccaaggccttcgctgagagggaaagcaccttctttatggaaacatctgcgctggaggccatgaatgttgagaacgccttcactgaggttctgactcagatctaccgtgtggtcagcaagaaggccctcgacataggcgatgaccctgctgctccancgagagggcannacatcaatgttggtggcaaggatgatgtctctgctgtgaaaaa

SEQ ID NO: 7242 - DNA, 286 bp, Triticum aestivum
  Clone ID: LIB104-020-Q1-E1-A5
tcggtatgatgaatgctacaccaggatcaggacggtgaatgttagcgctattcgtgataattgtattagcatgtttggctttcgcatgtattctgatcgaatgtggtcttctcccgacggctgcttcacgtgtgctcaccaacgaagttcaatgctagcatgtcgtgtgaagtggctcgcacagcgacaatccgatggtgctgcataagactcggcaagacctatcatatgctgaagtctttcagtactgtcacagattgggtcaggtgaatcagccggtcgctct

SEQ ID NO: 7243 - DNA, 370 bp, Triticum aestivum
  Clone ID: LIB104-020-Q1-E1-A7
ccggggccacgggggatatgagacaacatacagtgagacgccagaagaggcgcaggcggaggaggattcggggggtttcagcttgttctgaaactgcaagcttggatatcagccgacttacaccgggatggtagcaggccagcaagcagcacttgtactgaacttgtttttgcatgtctagatggggaagtgattcttctctgtgattcttgtatggccattgtgtataatagaaacgtttgcatgcaaccacgggtctggctgcatggtctaaagagctaaacatgaacaaagaacacatctggagtatcctgtagcacacatggggaaaacacgtctctatagtgaaattgcggtatacatgtctgtc

SEQ ID NO: 7244 - DNA, 319 bp, Triticum aestivum
  Clone ID: LIB104-020-Q1-E1-B1
ccgccatagcccagtctgcgccggattctgtgctgatgacattggcggagtttgggacgacaatagaggcgtggaatgcactcaaagagatgaagattgagttaaatcgtgtcatgaatgctctggcacatgtgctgaagcgccaatttcacaagttgcagatggagaaaactgaatcggtgaacgactatgccatgcagatggataaagctcgacgagagcgacattgtggagaagtttttcagttcggtcactgataaattcacgtacatcatcggtacgctcgaacaactttacgatatccacgacatgaccataa

SEQ ID NO: 7245 - DNA, 253 bp, Triticum aestivum
  Clone ID: LIB104-020-Q1-E1-B12
ggtccacggggaagaagaagaagaagaagaagaataagaagaagaagaaggagaagaagaaggagaagaagaagaaggagaagaagaaggaggagaagaagaaggagaagaagaaggagaagaagaagaaggagaagaagaagaagaagaagaagaagaagaagaagaagaagaagaagaagaagaagaagaagaagaagatgaagaagaagaagaagaagaagaagaagaagatgaagaagacgaagaagaa

SEQ ID NO: 7246 - DNA, 460 bp, Triticum aestivum
  Clone ID: LIB104-020-Q1-E1-B7
ggtccaagatctccgggtccacgacgaaggccgggcactcgtcagcggcacagcgaaggacacagaatgccgagtgacatcaccaccttcttgaaccagtacctcgggcactgatgcagttcgagtggccttgccaaccggcgcctttctattattcctcgccctcagtggcacctcgtcttcatcatcagggagatcaatgacatgatgaggagctgcagcatgaatccagagttagaaacgaaaatccaatcgaccaaaaggaaaactacaagagagcgtaccagggttggaggtggcagcatcttccatttcttggtcgtctttcttggcggaggtctcggaggtagcagcactgcagatttcagaaaccagtcggtaagtcgatgagtcaaccaagagtttgtccgtgctaaataagaaaacacaagctccgttgttacccggagatagtgggaat

SEQ ID NO: 7247 - DNA, 445 bp, Triticum aestivum
  unsure at all n locations
  Clone ID: LIB104-020-Q1-E1-C1
cctgcctgtaccggcacgagattcncgagtccacttcggtacattgcgccaagggcgaatcaccgggcaccaccgcaataaaccggtccaggtataaaggcgtgaatgccagggacgaaccttcggatggctcgaacgccacgcccagctccacttggcgatcgcggaccatttccagcacctgttcattgatcaggtcatgcaccgtcacattcacctgcgggtaacgtgcgcggaatatcttaagaatcggtggcagcaggttgcccgcaaacgaaggcatcgccgccacggtgacgcggccacgctgcagggtgaaacgctgacgcagttcgtcttcggcattgtcncagtcggcaatcaaccggcgcgccaacggcagcagcgattcaccttcaggcgtcagtgcgacgttgcgggtattgcggctgaacaggcggccgct

SEQ ID NO: 7248 - DNA, 363 bp, Triticum aestivum
  Clone ID: LIB104-020-Q1-E1-C2
tccgagtccacggggtaccgcgaatgattcatcatactgaggaaatttagtctggcatcaaattttatatggtctgatgctcagacaccaatggaattgttcaaatcttacccagtggtgatcattgtaggctccatttgttatcaaaatacgctaattagtgcgtgctcatacaccaaaggaacagttcaagtcttgtcgcctgctcagtcaatcgtgagttacagtaaaagctataaatgtctagctttgagctcagtttagttttgaaatgcataattagcttttacattacatgtttgaaaggtttctcttctaatttatacttaaataaaattggagaaattctcatctcgctaaaaa

SEQ ID NO: 7249 - DNA, 467 bp, Triticum aestivum
  unsure at all n locations
  Clone ID: LIB104-020-Q1-E1-C3
acgcctgcccgtacgggcccgaaattcncgagtccacgggcgccattaccagccatattctcgtgaatgaggagcggagtccactcccttgggaataacccacctagcatggaagatacaaatagacctagttgaaacatgagctgctcgagtatacaaaacagcatttcatttgaaggtttggagtttggcacatacaaatttaattgggacggaaggtaaataccgcatataggaaggtatggtggactcatatggaacaactttgaggtttatggagtttggatgcacaagcagtattcctgcttagtataggtgaaggctagcaaaagactgggaagcgaccaactgagagagcgacaatgctacgtcttgagcttgtgttggttttccccgaagaggagaggatgatgtagcacagtagcgttagtatttcgctcagtttttgagaaccaaggtatcaatcc

SEQ ID NO: 7250 - DNA, 460 bp, Triticum aestivum
  unsure at all n locations
  Clone ID: LIB104-020-Q1-E1-C4
cgcctgcctgtaccggcccgaanattccgagtccacgggggaatcgctacatcgcgccgccgaacctggcggagaagctgatcacgaagcggctgtacgcggaaggggcggagtggaagaactgggtgtggcactcggagggggacctgatgctcaacgactccgtcttcgccgacagcggcggccccaaccagaggaagttcgagaaggatgacctcatcccgcccaagccgggatcgtacgtcaccaggctcacgcacttcgccggctgcttgccgtgcaagcccggcaagccctgctaaaccttggtggccccgccggccggccggacccgatcccttccgaatcttcaattctatagctttgttcaagtcttttactcaaagattcgtgtatgtattactatgacatttgagtagtctacggggttcagatcatagggccctgtaggttgttcctg

SEQ ID NO: 7251 - DNA, 459 bp, Triticum aestivum
  unsure at all n locations
  Clone ID: LIB104-020-Q1-E1-C7
cggtccgaanattccgggtccacgggtccggatatcttgtggagctcggcccactgggccatctgttcgttcagcaacagtggacactttggcgtgctgaattgcgaccagaaaagcttctctgttgcatgcccttctttcgcttggaaaaaccgcgcctcatcagagacactcttcggcaagtccaagaatgcatctggagaactccacttttgattaagcggggcatacttcggatcaacgaatttagtctgtaataagaaaggcttaccggccgctatctccccagcttgccggatcttctctcgagccgccctagacacggatcatgcttctctcgcctcttgtaaggccttgtcgagatcgacctttttggctttgttatccttctcgaggaattcgcaccggacagtggcttccttttgctcgcgcgccatggtagacattctctcctcgcac

SEQ ID NO: 7252 - DNA, 452 bp, Triticum aestivum
  Clone ID: LIB104-020-Q1-E1-C8
ggtccaagattcccggggccacgatgacacaccttatcgaagactcggacatggaacttcttatggcgatggcatccacacatggccatcaccaccttgctgtcggtgtcgcaacttaccgaacaacaattcctttctccatctctcgtgacgcagctcgacgacgatggagacacgcaccagcagctagcagcatcgcgccgccacctacgtccaccttgtgccggcgacctccacctcacatggatttcgccgtgccgccgccgtcgccttggatcgacaaggctctgataccaattgttggcgccgcctcctcgcgttgcagcgccgctccttcttctacctcaagctgccttacacaactctcttgaggtttctctcaagaacacaagaatacacacacacacaagaaactctacacacacgcaccaaggaagaagcccaactacctt

SEQ ID NO: 7253 - DNA, 489 bp, Triticum aestivum
  unsure at all n locations
  Clone ID: LIB104-020-Q1-E1-D1
acgcctgcctgtaccggcccgagnattccgagtcgacgggaaaggttagaattttcaccccacccaccacccatctcgtcgccaatgtggagaacctaaccaaagtcctcgcaagcggatccgacgacaccgatgacatggacgaggaggtcagtgagtcctcggcccgcctgcaaacaaccaccacaccaacgaggaagtggatgacaacctccacctacgacatctacgtggtagatactccccacgacaacagtggcagaggcgataatgataacaatggccgggggaggcaacggtagcaataacggtgggaatgataacatggcaccaatgccaacaaccccaacaacaaccttggtcccgatcacaaggacaccttaaacaagtcacttggcagtcccaaccacgatgcattaaagctaaggctgctcgacaccgccaacaagataaccgatgaaaagcaacgacttcgtgacaaagagaaat

SEQ ID NO: 7254 - DNA, 311 bp, Triticum aestivum
  Clone ID: LIB104-020-Q1-E1-D3
tccacggggtggccaagaacttcgattgccatggccaggttgttgcggaagcttgtgcgttgaagagtggaaggagctgttaaagctttttctttcggcagttggcttattatgctctggttccctgcaaaaaaaaagaaaaggcttattatgctctggagctgtcttgcatttttccttcttgcaatgctgcgttagcggtatgtaatcctgtaaccatattttgagtactctctggtgtttcaaaaaaaaaaaaaaaaaaaaaaaaaaaaaaaaaaaaaaaaaaaaaaaaaaaaacagacgaacaaaaa

SEQ ID NO: 7255 - DNA, 385 bp, Triticum aestivum
  unsure at all n locations
  Clone ID: LIB104-020-Q1-E1-D4
tggtacgcctgccatgtacggtccgagattcncggatccacgggtccatgccatgccaatcattgagctttcctgaaatatttatcttgaaatagcattagctcaataagctatatgttgttaggaattaccaaaaccacctagggatagttgcactttcaatactctatgtgcttcacttatatcttttgagcttgatagtttttgctctagtgcttcacttatatcttttagagcgcggcggtggcttaattttgaagaaatttctagtctctcatgcttcacttatattattttgagagtcttttagaacagcatggtatttgctatggttataaaattggtcctagaatggtaggcatccaaattgggtaaaataaaaact

SEQ ID NO: 7256 - DNA, 478 bp, Triticum aestivum
  unsure at all n locations
  Clone ID: LIB104-020-Q1-E1-D8
ggtccgaanattccgggtcgacgggacccaaggacttctattcttaaggattggagggaaaatattgtgacaactatttgatccaccggaagtttcatgaggttttactctgtgtgattaagatggcagcagattacctcaaacctaaggacccaaactttagtgtgcacccaaagattcgaaaggatagaagggcttatccccatcttaaggattgcagtggtgcactagatggtactcatgtcagagcttctattcctgttgacgaccaagttagatacattggaaggtcaggatcaacaactctgaatgttctggcaatatgtgattttgacatgaatttcatgtacacctcagttggtcaacctggttttatgcatgatacatgtgtcttgtatcatgcaattgaagctgatanagataccttccctcaccctccgaagggttagtagttcctataataattttgttactcaaa

SEQ ID NO: 7257 - DNA, 491 bp, Triticum aestivum
  unsure at all n locations
  Clone ID: LIB104-020-Q1-E1-E1
acgcctgcccgtacgggcccgagattcncgagtcgacgggagacggctcgaatacctgaagcacgagaatttcatggaatgagcagtcagttagtcaaggcaatgccgagtcttatttttacaaaagtccaggaagacaattgtacttcgccaacatgtgccatttgcttggaagactacagtgttggtgaaaagataagggtgctgccttgtcgtcacaagttccatgctgcttgcgtggacctgtggctcacatcatggaggacattctgccctgtatgcaagcgagatgcaaatgctggaatgtcaaatttccctccatcagagtctacccctttgctttcttctgctattcccttgccagctgaatccacaactttgtcttcttttcgttcaatggtagcagcatctcctccaaggacaataagccggcatccttcatggcagtccatgtcccgcactaactccaattccagtatcctcacatcccg

SEQ ID NO: 7258 - DNA, 400 bp, Triticum aestivum
  Clone ID: LIB104-020-Q1-E1-E10
cgggtcacgggaggcggtcacggtacaaaaagcgcgacgacgacgacgatgatgacaggaagccgcggtacaagaagcacgacgacgacgatgatgaccacgagaggaggccgcggtacaagaaacgtgacgacgacgacgatgatgacgatgacagaaggccacgttacaagaagcgctacgacgacgacgacgatgatgatacgaagccacgttacaagaagcacgatgatgatgatgacgacgacgatgataggaagcagcgtcgcgggaacaatcgccgccgccacgatgacgatgactgattatgacatgactttacgctgacgctaataagcataattgcggcggctttgcatcgagtaattacgacatttcacatttttttcaaagcattttt

SEQ ID NO: 7259 - DNA, 472 bp, Triticum aestivum
  unsure at all n locations
  Clone ID: LIB104-020-Q1-E1-E7
ggtccgaanattccgggtccacggggcgaggaggcagcagatcgccagcgtggcctacaacggcagccttggacaagccaacaatcccttcgaaacgaacgaccctttcgccatgtccaacagctttgcgcccccttccaacatccggctggcaatggtgacccagcagcagcaatacttccaggctcaacaacatcagcagcaatactactaccagcctcagctccaatactaccagccccagctgcagcagcagcatcagcagcagtatttccaggctcagcagcatcagcaccagtatttccagcagcagccccagtattgtgtgcatccggccggaacttacaatccgtttggtgaccctttcactgaccttgtaactctggctgctccttcaaaacaaggcgatttaagtttgctctgaattgcccggccctgtttctgatctcagtcaatatagatgggtactccc

SEQ ID NO: 7260 - DNA, 442 bp, Triticum aestivum
  Clone ID: LIB104-020-Q1-E1-E9
ccgggtccacgggaggcggtcacggtacaaaaagcgcgacgacgacgacgatgatgagaggaagccgcggtacaagaagcacgacgacgacgatgatgaccacgagaggaggccgcggtacaagaaacgtgacgacgacgacgatgatgacgatgacagaaagccacgttacaagaagcgctacgacgacgacgacgatgatgataggaagccacgttacaagaagcacgatgatgatgatgacgacgacgatgataggaagcagcgtcgcgggaacaaccgccgccgccacgatgacgatgactgattatgacatgagtttaagctgacgctaataagcatagttgcggcggctttgcatcgatgaattacgacatttcactttttttccaagcatttttcatttcgctgttcactgggcaccatgcctccaatcgtatgc

SEQ ID NO: 7261 - DNA, 433 bp, Triticum aestivum
  Clone ID: LIB104-020-Q1-E1-F5
cccggggccacggggaccacaaagagaagaaggacaagaagaagaagaaggacaagaagcacggcgagggccacaaggacgacgacggccacggcagcagcagcagcgacagcgacagcgactgagccagctccggccgcgctccggcagcagcgtgcagtgtaggcgagatcgatgaacgcttgggagaagtgtggcatacatatatgttgcagggtttggagcgtgtggtagcatatgtatgtaatgcgtgacatgtctcatggatcttgtgatgtataataattagccggctgcactgcactgcacggtgcttgtaataataacgttaatgaatcatgttggtattgatgcatctccgttggtaatttggtatacccatgttttttaaaaaaggccacaacagataaccaataaaggggccgccctaaag

SEQ ID NO: 7262 - DNA, 217 bp, Triticum aestivum
  unsure at all n locations
  Clone ID: LIB104-020-Q1-E1-G1
tcgacgggggcaacccaattttattttgtgttctttgtttttgttcctgtttagtgttaaattttgtttctactttctgtatanatgtggntttgtgttttaattaatgtttgtgccaagtaaaacctataggataagctatgatgatagttaatttgattctgctgaaaaacagaaactctgcactcacgagaaaaaattaaattaatcacaggaa

SEQ ID NO: 7263 - DNA, 433 bp, Triticum aestivum
  Clone ID: LIB104-020-Q1-E1-G2
ctgctgtacggtccgagaattccgagtcgacgggttgacgaggagggacggcgggacgagctggttcgccgacaatctcaacaggggccatcttgattacttctacctgctcctcgctgctctcagcgcgctggagcttcttgctttcctctacttctcggcgaattacatttacaagagaaagcttgtcaatgttcactgaccgagactaatacatccgtctatgtactatggatttgtggccaggtatacagtacaattgcagttagcatcagtaaagttatacgagtacgctgacgaccgaccctcagattttttttctttttttgaaaaaaaaaaaaaaaaagaagaaagaaaaaaaaaaaaaaaagaagaagaaaaaaaaaaggaaaaaaaggaaaaggaaaaaaaaaaaaaaaggggccgccctaaa

SEQ ID NO: 7264 - DNA, 320 bp, Triticum aestivum
  Clone ID: LIB104-020-Q1-E1-G3
cacggggatcgccaaggagctgcggaagctgcacagggaagcggttcagaacaccatcaactcggttactctggtggcaaccctgattgcgtccatcgcgttcgtctccatcttcaacctgccaggccagtactaccaggacactagcagcgggggagagatcggggaggcctacatatccaagctcaccgggttccgcgtgttctgcctcctgaacgccatcgccctcttcatctcgctcgcggtggtggtggtgcagattacgctggtcccctggggagaccggcgcgcagaagcagatcatcaagattgtgaacaag

SEQ ID NO: 7265 - DNA, 448 bp, Triticum aestivum
  Clone ID: LIB104-020-Q1-E1-G9
ctgcagtacggtcctagactcccgggtcgacggagagaggctaacaatgatggaagggtgagagtgcatataatccatggactcaacattagtcataaagaactcacacacttattgcaaaaatttattagttatcgaaacaaagtactacgcgcatgctcctagggggatatattggtaggaaaacaccatcgctcgtccccgaccaccactcataaggaagacaatcaataaataaatcatgctctgacttcatcacataacggttcaccatacatgcatgctacgggaatcacaaactccaacacaagtatttctcaaattcaaaactactcaactagcatgactaatataacaacatcctcaaaacccaaaacaatcatcaagtatcaaacttctcataatattcaatgcactttttatgatagtttttatttataccatcttg

SEQ ID NO: 7266 - DNA, 448 bp, Triticum aestivum
  Clone ID: LIB104-020-Q1-E1-H11
ggtccaggactccgggtcgacgggagcgcggggcagaaggagcgggtgcggctgctctaccgccgcgcgctcaaggacaccctcaactgggccgtccaccgccacctcttctaccaggacgcgtccgagctcagggacaagttcgaggccaacagaaatgtggagaacctggacgtgatcgataggctcatcgaggacgcggaggcgcagcagaggaacttccagcacccggatccttacattgttccatgggctcctggtggcactaaattcacaaggaaccctcctccacctgaagggattgagattatctacaactatggcaaagaagaccaatgaacaagaatcatgcatttgtgagcagagcctggcaccggcggagtgcagaggacttacttttgcttttccagattataacatgcaactgagctgctggtatgttaagaac

SEQ ID NO: 7267 - DNA, 319 bp, Triticum aestivum
  Clone ID: LIB104-020-Q1-E1-H4
cgacgggaggcgctggtggagcaggaggggctcttctggttcgggagcttctggggccggacggagcagggggaccccgtgtccgcggaggatcagatgtacgcaggcttgagcttgccggtagtcctagagagagtgcgcgattaggcaccgacgacgatgcagtttgatgcaagcggcttgcattgcagcttctagatgaggtttctacttttccatccgggcatcattcggtcattgcactgatgattccattccttactgtacatatgttatcatcatggtacgcctatcaatcaaagggacaatcctgaacaat

SEQ ID NO: 7268 - DNA, 473 bp, Triticum aestivum
  Clone ID: LIB104-020-Q1-E1-H6
attcccgggtccacgggctgcataaaaaaggtccctatcacaagtggcaatataaagtgacgttccctcgcattaagattttgtgcatccaactataaaagcgcatggcaacctctgcttccctctgcgaaggggctatcttttattcttgtcttttaccttatgcaagagttatggtgatcttcaccttttcctttttacatttatcctttggcaagcacattgtgttggaaagattctgatatatatatatatatccaattggatgtaaggcatcatgagctattattgttgacattacccttgaggtaaaaggttgggaggtgaatctataagcccctatctttctctgtgtctgattaaaactttgaacccataaatatcgcgtgagtgttagcaattgtgaaagactaaatgatagttgagtaaatggagtttgctaaatcaaagctctgacataaactcctcctgaa

SEQ ID NO: 7269 - DNA, 457 bp, Triticum aestivum
  unsure at all n locations
  Clone ID: LIB104-021-Q1-E1-A1
gggtccacggggttcgaacagcggccagtcctggcttacttccaaggagccattcacaaggaaaagatgggtggaaaaggttcgtcagaaagctgttacagcttctcaaggacgagaaagacgtgcacttcacctacgggagcgtccggcagaacgggatcaggcgcgccaccaaaggcatggcatcgtccaagttttgcctgaacatcgccggcgacacgccctcctcgaaccgcctcttcgacgccatcgtcagccactgcgtccccgtcataatcagcgacgagatcgagctccctttcgaggacgtcctcgactactcggagttctgcgtgttcgtccgtgcgtcggatgctgtgaggcaaggctccctgctgcgcattctccgangcgtgaccagggaccagtggactaccatgtggagaaggctgaangangtggctcatcactttgagta

SEQ ID NO: 7270 - DNA, 53 bp, Triticum aestivum
  Clone ID: LIB104-021-Q1-E1-A11
cgtagcgtgctccccagcaggcgtccaccggtcgggcgtctcatcctgttgtg

SEQ ID NO: 7271 - DNA, 341 bp, Triticum aestivum
  Clone ID: LIB104-021-Q1-E1-A12
cgcctgcttgtaccggccctaaattcccgagtccacgggggtactctgtctctaaggttcgttccaatctcaccattttatttgattgagatgagagaggggtcaggtggcacgcggtggctgttcgtggttgcgtgctgcttatgtactgtgcaattttattttttatttttttggagatagttgctgctctgtgctagaaggagggatgaacagaggagaaacaggacagggctgggtgttgtctgcacacagagatattgagataattggtactattgttgtaaaatgttttaatggaaaaaaaaatcctccattcccttgcaaataagtttggttta

SEQ ID NO: 7272 - DNA, 458 bp, Triticum aestivum
  Clone ID: LIB104-021-Q1-E1-A2
cgggtcgacaggaaaaaatgacgtaatgagatgatggtgccatcaagaagttttcgacgaacgtagtagcggccaaaaatgaaactcttgcatgaaagaccggatttgacgcaagatgaatggcgttggggtttttcaaatgaaacccgtgatcagaaagtcaccaacggagccatacaatctatctagtagtgtgccatggcacggtactccgcttcggcaatggaaggagcaactgtctattgctttatctcatccaagatagtgtctcgtctccccataaaatagataagcctgtagttgagcacctatctgaaggcccaatcggcatcagtagttgcacgcaactctaaagaagacgatgatggaaaaaaggacggctcgagaaaaggtacctcgaatatatctaagaatctgatgaactgctgcaaagtgaactgaccggggggcagccatgg

SEQ ID NO: 7273 - DNA, 479 bp, Triticum aestivum
  Clone ID: LIB104-021-Q1-E1-A5
taccggtcctaagctccgggtcgacagggtatgactcctaatatcgacattaagttatacactcacatgatttcaaaattattggcatactctatgtgcttcacttatatcttatgtgcgatataggttttgctctagtgcttcacttatatcttttagagcatggtggtggatttgttttatagaaactattgttctctcatgcttcacttatattattttgagagtcctttagaacaatatggcaataataaaaactttcatacaagtgcattgaatattatgagaagtttgatacttgataatcgttttgagatatggagacggtgatattagagtcatgctagttgagtagttgtgaatttgagaaatacttgtgttgaagtttgtgattcctgtagcatgcacgtatggtgaaccgttatgtgatgaagtcagagcatgatttatttattgattgtcttccttatgagtggcag

SEQ ID NO: 7274 - DNA, 422 bp, Triticum aestivum
  Clone ID: LIB104-021-Q1-E1-A7
gggtcgacggggatagtaaatgttatcgacacccgtacgaggagaattttgaggggagcagtgaggaagggacacctagtaagagcaaattccaattgaaactcagagatctccggagaagcacttcctcgtttgctttattggacaggaattatctcactcccatttttacctctcaacacgaggacgatgatgacgatgacgacaacgacgatgattcttgtgaagtgttggcgatacccaggcccagcgcctagatgttgggaaggctatagctaatgactgcaagcacaaagtgaccggtttttggcggatttacacgaagaagctctcagggctggtaccagttctgggttcgtcggagttttgacaaaaactgttctgtctgcgttgagataagctcttctgatttcttctgatgc

SEQ ID NO: 7275 - DNA, 241 bp, Triticum aestivum
  Clone ID: LIB104-021-Q1-E1-A8
attcccgggtacacggggatagttgatgttatcgacacacgttcgatgatttctttgatgagactaggaaggatgggacatcaacatcttccatacactagttgcaatgcagatatcaccggtaacgtatatccgcgtctgcctcagtagtgaagcatcatcaatccgcatgtttactacacatcagtaaggtgttttagactatgacgacaacgacgatgattcatgtaaactgttgcgt

SEQ ID NO: 7276 - DNA, 391 bp, Triticum aestivum
  Clone ID: LIB104-021-Q1-E1-B1
gacgatgtgcccgatgatgatgatctccgccgggtcattgttgatgcaagggcacagtgagagagtcaaaaggagaagctgaaggtcgatcacatgttagaggatcacaaaaaagggttgtaccccaattgcgaagatggcaacacaaagctcgggaccatactggaattgctgcagtggaaatcagagaatgctgtgcctgacaaaggatttgagaagctactgaaaatattgaagaagaagcttccaaaggataacgaattgcccgacagtatgtatgcagcaaagaaggtcgtatgccctctaggattggagctgcagaagatacatgcatgccctaatgactgcatcctctaacgcgatacgtacgaggatttgaaccatgcccggt

SEQ ID NO: 7277 - DNA, 423 bp, Triticum aestivum
  Clone ID: LIB104-021-Q1-E1-B10
ttcccgagtccacgggaggttcacaggagagaaacgacggagttagaagttgtaaatatgcattgttgtatcgcgacctgaatgaaataaacgaaataatgctcttgttcaatcgtcagcctccggttcaagtactgcaccaagctgttattttttacctttttgaaaagaagcacgtgttgctgtgtttattttatatttttatctaaggatccagacatctacaaacacacccagtgaaccaccaaatggtcatatacccctaaaacccctttgcggggcaagggccaaaataattaattcaaccaattaataagggcctccttcaaggttaaaaaaaaaaaaaaaaaaaaaaaaaaaaaaaaaaaaaattaaaaaaaaaaaaagaaaaaaaaaaaaaaaacgggcgctccaaaggattca

SEQ ID NO: 7278 - DNA, 425 bp, Triticum aestivum
  Clone ID: LIB104-021-Q1-E1-B11
ttccctagtccaccgcgggcgcgaacagctccaagtcgcccgcaagcaccagaagagctcccgcaagtggacgtgcatcggcatcggcatcctgctcgtcgtcatcctcatcatcgtcatccccatcgtgctcaagaacaccaacaagagcaacaacaacaacaaccagcagtagtaggaatagcttgtgatgatatgatcctggcttgcttgcatgcttgctgggtgttgttgatcgttttttgtggaattttttgcgattgtaattactccatccgtgcggttcgttgagccaatcgattatgttatataactatatacttttcggcgattaaaaaaaaataaaaaaaaatagggaaaaaatttattgaattaatagataaaattgaaaagattttaaaaaattaaggaggagtaaataaaaa

SEQ ID NO: 7279 - DNA, 288 bp, Triticum aestivum
  Clone ID: LIB104-021-Q1-E1-B12
ttcccgaggtcacgggcaactgcgaattgtttaatccgatctattagaaaaaatagagagaagaccatgacccgaagagggacgtggacgttggcacgttttctatccgcggtttccatcctgggccaagctggccttggatcgcctccgctgtagaagagccgccgtagagattgatgtggtcagattgccccaacgaagttactggtgttacaactactaccatcagtactgctgctatgtgcaaagctccatgcatgatttccaaacttgaattaagcttttttc

SEQ ID NO: 7280 - DNA, 463 bp, Triticum aestivum
  Clone ID: LIB104-021-Q1-E1-B2
cgggtccacagggcgacggtggcgatggactgccggccgttcggcggcggcgagagcaagctcaaggcggaggcgacgacggacaacaaggggtggtacaagatcgagatcgatcaggaccaccaggacgagatctgcgaggtggtgctgaccaagagccccgacgcgtcgtgcgccgagatcgaggagttccgcgaccgcgcgcgcgtcccgctcaccagcaacaacggcatgaagcagcagggcacccgcttcgccaaccccatcgccttcttccccaaggagccgcgcaaggagtgcggcggcatcctccaggcttacgacctcaaggacgcacccgagaacccatgaacccccatcccatccatatagtctcgctcagttgcttcccatcatcatcatcatcatcgtctcctcatgactctcctacgtacggtgcccttgcctagctacttctgttcca

SEQ ID NO: 7281 - DNA, 442 bp, Triticum aestivum
  Clone ID: LIB104-021-Q1-E1-B4
gggtccacagggatggtccgcctacgcagctcggacggtcaggagctcgaggtgatggaggaggcgatcgccgccgcgtctaagacgatcaaggacgcgctggagaagggcggcgccgccgacgacgccatcccggtccccgacgtcaccggccgagtcctctcccgcgtcctcgagtacgtcagcaggcacttctccgacccggccgcggccgccgacccgttcgactacatccccaacttcgacaacccgctcaaggccttcgacgacgccttcgtccaggtcgaccaggacacgctcttcgacctcatccacgcggccgagtgcctcgacattgaggggctgatggacctggcgtgtaagacggtggcggaccagatgaggggcaagaccatcgaggagatccgcaaaaagttccacgtcgtcaacgactacaccgcac

SEQ ID NO: 7282 - DNA, 451 bp, Triticum aestivum
  Clone ID: LIB104-021-Q1-E1-B5
attcccgggaccacgggtcatctaaacgatgaactcaaagtggacaggccattgtcctgcctgctataccttcgtctgagtgactgcagggtaactacgatagaactcaacgcccccaagctccaaacctttatattccaagggaggctggtgcctattcaccttggcgaatcttcagaactgcacaatattgttattcattcttatacactaacactagagcaagctatttgttcatttgctgatgcgtatccactagtgcaacgcctgactctgtgtcacacttgtgcactaccgaagttcccctggcgattggacaatacttctagcttttctcatttgagatatttacaactgttgttgaatatcttctctgaacatgccaacgacattctctctattgcatattttctagaggctgctccattccttcaggagtttgatttggagt

SEQ ID NO: 7283 - DNA, 381 bp, Triticum aestivum
  Clone ID: LIB104-021-Q1-E1-C11
ttcccgagtccacgggcgcttgcacaggataccaagcgagtgtttaggatcccacacagggcatttcttgacatgctcctagcacaccttgggctaatcaccggctcagtatgatcgtgttgtacatgaggacggcaagatctgtgtgaccatctttttcaacacctgtacattggatcttggaggaccaatcagtatgaacgcgtcgtgtcatcattcctcctggtctacattatgcccagacatgcaaagttgtggatcgtctgtaagctaccatttgctttcgtatgtcctatgtctgtgatatttgcaactaaacctattgtgctacgtgctttctatgttcgtacattgttaggtggctccttattgtgtgcatac

SEQ ID NO: 7284 - DNA, 365 bp, Triticum aestivum
  unsure at all n locations
  Clone ID: LIB104-021-Q1-E1-C12
ttcccgagtccacgacggtggtgttggtgagcatgccgatctcgagcggcatgcagccctcgagggtgttgttgaggaagatgatctcgtcgagcgtcttggccatgcggccgatgctcttggggatgcatccgacgaacttgttgtttgcgaagacgacgacggaggcggtggagttgccgatggtctccgggatggggccgacgaagcggttgctgttgacgaagatggcgtcgtatggcttgtcgaagagcgcgggcggcagctcgccctcgaactcgttgaagcggatgtcgatgtacttgagcgtgggcatctcgaggcagacgtangggacagggccgacgaagcggttgttgctgacg

SEQ ID NO: 7285 - DNA, 301 bp, Triticum aestivum
  Clone ID: LIB104-021-Q1-E1-C2
tggatgcacaggcgctacgaatccatgcttaatcgatatggatcccattggttcagcacgtttcgtactacatcttgatgatatttggcaggaaacattttgcgcaggtttacaacgtgaggaaactcttcaacacatctagagtatggaccattcacacgccattggtccatcatgcagtatccgcgcttgggactggaacttcagctcacccgtgcattataggcccgaccagtcagtacaatatcctaccataacacgtgacgacaccaccgggtcattactctaaccctttggttaa

SEQ ID NO: 7286 - DNA, 462 bp, Triticum aestivum
  Clone ID: LIB104-021-Q1-E1-C9
ttcccgagtcgacgggatgcggctgcggctgcagccatagccgtgaaccatgtgtggatgaggtgagggagatggagtcgatagaatccctaaggaaagctttttgcaagcagatcaaacaaactggaggggtggcgctccatgctcggtagggtaggcagtcatgatgcttattagggatgggagttggtagttgggacccaggatcgtttatgggctgtgtgggctgactaggcccgtttcttgctttgcctattttccaatgcttctgtgtgcagaaccatgtgctactttagtgtttgtgcctaagatctattgttcacgaaccccaaccttcgatttgccgaaccctgatctctgatttgccgaacccgaccttcgattcgctgaaccccaatctctgatttgagatctgccaaacctgacctttgattcgccaaatcccgatctctgattcgccaa

SEQ ID NO: 7287 - DNA, 448 bp, Triticum aestivum
  Clone ID: LIB104-021-Q1-E1-D1
gggtcgacagcaggttaggtgcagcaggggaagttctttgtctgctgatgaatataatactttcatgaatatatttgaaagggattctcttctctattgcaatatgtcatttgatgcactgttaagtgttcgaaagcaacttgaagaatttgaatttccttgcaaagctgtaaacgatggtctttggctccagatgctcctgtgccacagagtgcaagcaatagttgctgatacttgcagaaactgttgccttacaagtaattcttgtgcttgtaaacaagcatatgttggtacacacagccactacaggcaggagcatgataggacaagtgcttcaggaactgcaggtagtatctaccttgcagatgcccaaggcgatgggaatggtatgtttagtcctgtgcgtgttaacgtaagaggagcagttgatggacttgctggcattggg

SEQ ID NO: 7288 - DNA, 432 bp, Triticum aestivum
  unsure at all n locations
  Clone ID: LIB104-021-Q1-E1-D10
ttcccgagtcgacggggactagttgagattctagaacagaagaatgcccgctacgtgccctttgatggctgggagaagatcgactccaaagagaagacggccggcgagctgaagaacaagcctagggagaagatcacaagatggaatgagctcctggaagctgcaagggagggttagttgaagggccacacatatgcatctgacggagctgctggttcatgcgtaaactgaatcaaagaaacaaactacgagggacaatctgaatactgacacaacagaaagaaagtcaagtgctaatgtgtcttagcaatgaatcatgcgtaccaatactggttaaaatcccaaaaggctcgatcactgaagccacatgaaactactgtattcgtgagatgcanctcgtctaaatcatgggcattcctttggaaaaaaaaa

SEQ ID NO: 7289 - DNA, 388 bp, Triticum aestivum
  Clone ID: LIB104-021-Q1-E1-D12
ttcccgagtccacggggaggaggaggaggtagggaaggaggcttctctcggagacatcatcaacctcaagttggtggagagcggcgagaaggagcggctgatggagcttctccgggagcggctcgtagagtgcggctggagggatgacatgaaggctctctgcagggcttatgcaaggaaaaagggaagaaataatgtaacattagatgatcttattcatgttattactccaaaaggaagagcctcggtgcccgatgcggtgaaggcagagctgctgcagcgcatccgatcctttctcatgtcttcctcgctttggtagcccatgaatcacgccgatcggaaggcacgtgtaggaagcttgaagcatcgatcttgaacgcgtgacact

SEQ ID NO: 7290 - DNA, 303 bp, Triticum aestivum
  Clone ID: LIB104-021-Q1-E1-D2
atagaaaattaccgtgggcgagatgctcgggattcacctgccgagcgatcacttcaatctgcagagcatcatactcatcgagtacctacaggaacggatcgtgatgcaatgcgctttcgtcaatgatatgcatgatagccaaatgcacctctacctatgcgtctagacgagacatactaggtacttgggattccttttgcagtagtaaatatatcgtcgcagcgagcgtattccaaaatatattaacggtacctcgagtcgcagaccaatgagcagtgcactgatacaatcatctcaaatatc

SEQ ID NO: 7291 - DNA, 452 bp, Triticum aestivum
  Clone ID: LIB104-021-Q1-E1-D3
ggtcgacaggtatgtttcctaaccatagacatgtgttgtcattggatgaacgggatcacatcattaggagaattaatgatgtgatggacatgacccatcccttagcttagcattaagatcactacagtttcattgctactgttttcttcatgcttatacatgttcctcggactatgagatcatgcaactcccgaataccggaggaacaccttgtgtgctatcaaacgtcgcaacgtaaatgggtgattataaagatgctccataggtgtctccgaaggtgtttgttgggttggcatagatcgagattaggatttgtcactccgtgtttcggagaggtatctctgggcccgctcgctaatactcatcactataagccttgcaagcattgtgactaatgagttagttttgggatgaagtattacggaccgagtaaagagacttgccggtaacga

SEQ ID NO: 7292 - DNA, 448 bp, Triticum aestivum
  Clone ID: LIB104-021-Q1-E1-D4
gggtcgacagggatgtaggacgaaggcttttctcgccaactgaactccaataggctattttggactttttgcacataattattaaagatagattttcgtgccatgcgtaaaccaagctgctgagagtctaccccagccacaagggggagctgctccagtagttcaggataccccacccagccccacaagggttgacggaccccctacctatacctatacctgatgattacctatacctgatgattttcaatccacagctcattttcttgaatatgtgacaagccttgcaaattgtgataatatgtatcaaattagtggtccgcataacccaatatttgaaaattatggaggtgcaggcccaagtacttcgaatcatcaacaagaaatccaagaaagaacagcgaaggaaaaacgtgacaagaaaagtgttttctcgactcgagatgtt

SEQ ID NO: 7293 - DNA, 441 bp, Triticum aestivum
  Clone ID: LIB104-021-Q1-E1-E1
gggtcgacaggtatatggagcaagcatcaagggatgagtaagagctcttcagaggtataagacgataaaataaccttgatgtccgtgagatggcagttgcaaatcaaattacgagcggctatgaacgcccgagtagcgattattaaatgagcaaaggtctaaggaatatgaagaaacttctatggattactacgatttgagagctgacaatggtgtaaatggacaaaaaataccagtgtaattcacaatttgacaagtggtgaagccaagtccaggtcaaagcaatcgaaaacagaaaatgttcagatttggttacaactatagatctggaaaatatttgaaaaagaaaagaaaaacctaggtatggtggagctgctaggtgaagaaacggcaatggagtccacttggtgcaacaagagggatctaaaacgtgatcaattt

SEQ ID NO: 7294 - DNA, 416 bp, Triticum aestivum
  Clone ID: LIB104-021-Q1-E1-E10
ttcccgagtccacggggcatgggcaccttattcggaacctatgcgggtggtttccatggcgaggagaggctgggaaagcttggctatctcgttggaagccagctaggcagctgggttgggggaagaatcggactgatggtctatgatgtcatcaacgggttgaactacatgcttgagtttgtccgtccagaggagtatcgatcatcatcttacgcagcagaagagggctcagagtatgcagataactacagaagttcgtcttacgtatcagaagagggctcagagtatgcagataactacagaagtcgcgaaggatatgagccaacatacagtgagacgccagaagaggcgcaggcggaggaggattcggggggtttcagcttgttctgaaactgcaagcttggatatcagccgac

SEQ ID NO: 7295 - DNA, 432 bp, Triticum aestivum
  Clone ID: LIB104-021-Q1-E1-E11
ttcccgagtccacgggtggaacaacattgtggtttatggagtttggatgcacaagcagtattcccgcttagtataggggaaggctagcaaaagactggcaagcgaccaactgagagagcgacaacagtcgtaaacatgcattaaaattaattcacaccgagtacaagcatgagtaggatataatccaccatgaacataaatatcatgaaggttatgttgatttcattcaactacatgtgtgaaacatgtgccaagtcgagtcactcaattcatttaaaggaggataccatcccatcataccacatcataatcattctaataacatgttggcatgcaaggtaaaccattataactcatagctaatcaagcatggcacaagaaactataatctctaaatgtcattgcaaatatgtttacttcataatagctgac

SEQ ID NO: 7296 - DNA, 448 bp, Triticum aestivum
  Clone ID: LIB104-021-Q1-E1-E4
cataagggctgaattggatgctatgatcaacttgatacttgataattgttttgagatatggaggtagtgatattaaaatcatgctaattgggtgattatgaatttaaagaatgcttgtgttgaagttagcaagtcccgtagcatgcacgtatggttaaagttgtgtaacaaatttgaagcatgaagtgtacctggcttgtgcatccttatgagtggcggtctgggacgagcgatggtcttttcctaccaatctatccctttaggagcatgcgcgtagtgcttggtttttgatgacttccaaatttttataataagtatatgagttcttttgaccaatgttgagtccatggattatatgcacttttacctttccatcattgctagccttttcggtaccgtgcattgccctttctcaccttgagagttggtgcaaacttcgccggtgcat

SEQ ID NO: 7297 - DNA, 197 bp, Triticum aestivum
  Clone ID: LIB104-021-Q1-E1-E5
acgggtcaacgaactcattggcgcaatgatgaaattgctacttgaaaattgttttagtatatggaagtaatgatattaatctcatgcaaattgggtgattatgacctgatacaaagcatgggttgaagtttgcacgtcccgttacaggcacgtgtcgataaagttgtgtcacataattagtgcatgaagtgctacca

SEQ ID NO: 7298 - DNA, 461 bp, Triticum aestivum
  Clone ID: LIB104-021-Q1-E1-E7
acggtcccacattcccgggtccacggggagcacaaaaagaaggacggggagcacaagaaggacggcgagcacaagaaggacggggagcacaaggagggcatgatggagaagatcaaggacaagatcagcggcgacggccacggcgacggcaagaaggacggcgagcacaaggagaagaaggacaagaagaagaaggacaagaagcacggcgagggccacaaggacgacgacggccacggcagcagcagcagcgacagcgacagcgactgagccagctccggccgcgtgcagtgcaggggagatgaacgcgtgggttaatttggagcgtgtggtagcatatgtatgtaatgcttgacatgtctcatggatcttgtaatgtaataaccggttgcactgcatggtgcttgtaataataacgttaatgaatttccattgggaatttggtaccatccttaacaaaa

SEQ ID NO: 7299 - DNA, 182 bp, Triticum aestivum
  Clone ID: LIB104-021-Q1-E1-E9
ttcccgaggtcacctgaccctgataaacgcgacagttaacgctgcatacattgttgatttcacgtgtttttctacaaatttttcaagtgacgctcatcttgtttaccggtgagatgtctatattacacggtcttgggaatgggacgtgatttaaaatttgtatctaagttcaaggaaaatct

SEQ ID NO: 7300 - DNA, 430 bp, Triticum aestivum
  unsure at all n locations
  Clone ID: LIB104-021-Q1-E1-F1
gggtcaaggattcactaaataaggtatctcanagaaaatccctgtttgcacaagtagagataattgcatattacattaagagtggcatcaaatcagtggcaaaacaattgctcgttccagccatagcaataaattaagatgcaaaactatattattacttgtgtcatcacaattccagtgcttcattacagcaccgggagttgatttttgtttttcttccacttgttcttccccttcatcacttggttcaataacagacaagcttcgccttcaatgtaagatttggcatgtcaattatggagcacaagtatagtactaaacttaattttctgatgaaagtggcaaaatacgggccagctgttgtgaaatatccttatcttatctcaatgggatattacggtgcacatacagattggaagtcttgtctcca

SEQ ID NO: 7301 - DNA, 453 bp, Triticum aestivum
  Clone ID: LIB104-021-Q1-E1-F12
ttcccgagtccacgggggtaccgtgatgatcatcggggcagagattctagaaggcgaagtcggagtcggagtggagatagatatggacgtgacaggtacagagagagggaccatcatcgtcgtagcaggagtcgtagcactagtcctgatgattacaagaggcgtggcagagacagaagtcctagtcgtagcaggagccgcagctacagtcctgatgatgacaggaagggtggcagagacagtttgtcgcccgcacgcagaagcactagtcgctcccctcgcaagacaccacctcctcgcaagacaccacctccttgcgaggggtctcctgctaagcgcaatgatgaccgttctcctgttaggcgcaatgatgaccgttctcctgttaggcgcaatgatgaccggtctccaggctctcgtagcccttcaacatgagctgaatgtcaaacaact

SEQ ID NO: 7302 - DNA, 456 bp, Triticum aestivum
  Clone ID: LIB104-021-Q1-E1-F2
gggtcgacaggaagtacgcacccaacgacaaagatttgatttttcagggaatttatatgcactggagcatgcgcatgtagttcaaatttgaattatgcacataaatgcattgaaaactcacttaatgcataaaaatttccaaacaaaccccgaaaaatcacaaaaattcacacaacactcctgttgttctatgttgacaggagaaaaaaacttgaaagcaataagaggcaatggatatcgtttcgtccccaaaggtgggacgttccctaccgaaaaccatcatgcttgttgtgagaagctccggtttgtgagaagcatatacccaaacctcccccaaatgggaaacaatttgtaccacggcatgttgatgccgctccatgatagcatgccaagtttcatgaatttcagatgagttttggatttactagaatttaaaaactaggcatctcactgttt

SEQ ID NO: 7303 - DNA, 376 bp, Triticum aestivum
  Clone ID: LIB104-021-Q1-E1-F3
cgggtcgacaggctatccgagacaggtcctcaaaaatcaaggccaatggcaccaacaacaacggaatccggaacaacattcccaattccggccaggtaaaccggttgctgaaaacaaagcattgcactgcaatttggaaatggttaaccgagtgcatgtcccggtcaagcgtcgttgctgcacgcaggggctggccctgcatggattgatgtatttttacactcaagctcgcaatgtaacaccgacatttgttgttctctagcatctactactatacgtgattgcaacgaacggaccaagacatctgatgaacacttgtcatgtttccctgtcgaaaatctttaatatatcaggaagcgttgctgctctgcatcta

SEQ ID NO: 7304 - DNA, 264 bp, Triticum aestivum
  Clone ID: LIB104-021-Q1-E1-F9
ttccgggtccacgggccatgttcacatgaaaggccagcccatacagcagcagaacagcagctgctgctcctcataagctcagcaagtcgagcagtgaattggatatactgaatacagaatttgtatacaacagagcgtgtgttaatacttactgtttaatatacttgtcacagtttgagcttgttctacaatctcattagtcattacttcgtcagtgttttaggcgcatttgatggatgttaggttacaaaaattgtatgaaaa

SEQ ID NO: 7305 - DNA, 343 bp, Triticum aestivum
  Clone ID: LIB104-021-Q1-E1-G11
ccacgggactccgcaagaggagggatggcaggctcgacgaattcgtccaggtcgatcccgtcagcaatccgagtggcggcagcaatgaaagtctccatgaatgactggaagtcgtgcctcttggtcttagcaactttaatagcctcctcctccactcccgacccggcgaccaaccccgcgatccggcgagcccgagatggggttcctggcgacctccgccatcttcttcctcgccggcttcatcgcatgcctcttctcgctcctctgctgcaaccgcggcgcctccaccaacatattccatttgaccctggtcatttacgctacagtttgttgttggatgatg

SEQ ID NO: 7306 - DNA, 464 bp, Triticum aestivum
  unsure at all n locations
  Clone ID: LIB104-021-Q1-E1-G12
attcccgagtcgacgggtcctagaacgagatcgcatgaaagcaattcaagaggaattggcgggattctttcttgaccacgtcatcagtaaaaccggagaataccatgtggaaattgatttcaaatcctagctaggggtttgtaattataagagatcttatacatattgtacatgtatgtagccagtagcgtcggatacatgatacgaaaacttgttgttcgaccaacctctcggagaaggagaggtcgatcgatcacttctctcggtatgcatgacgaacttctgtactgaatggttctctcgatcacttatgtatatatagtacgtagcgtccaagcacggacataagagaggacacttctctctattaattagctagctaacacaatatatganacacctaattaaattaaccccccaacacccccaacctcccctcctttcaaaanaaaaacacaaaaacc

SEQ ID NO: 7307 - DNA, 450 bp, Triticum aestivum
  Clone ID: LIB104-021-Q1-E1-G4
tcacgtggcacgtctgcatctatccgcgtggtgacaagtacagcactgattgcctcagcttgtacttatacctggatgcatcggatgagctccgtctcgagtccaagaaggtggttgtaatgactctgtccatcctggaccaaaagaatgggaaacacttgactgcaatttcaggtctcttggtgtttacgggtggacgcggctggggatgggctgatttccttggactcaagaatctgaaggacccggcgggaggctatgttgtgggatcgagctgcgttgtgaaggcggatctcactatcgttggttcatccaatgatggttagatgttcacctcatggcctgatggagagataatgcccttgcatcctacttataactagacttctatttgagataatgttgtagtagcactactaaaaacttgtgggatgatttagtagtaatgag

SEQ ID NO: 7308 - DNA, 361 bp, Triticum aestivum
  Clone ID: LIB104-021-Q1-E1-G5
attcccgggaacacgggcataaatgatacgtctgcatctatccgcgtggtgactagttcagcactgattgcctcagcttgtacttatagctggttacatcggatgagctccgtcgccagtccacgacacgtggctggtgtgactctgtccatcctggaccaagcgaatgcgaaatacttcactggaatttcacgtcacctggggtttacgggtggatgccgctggggatgggctgtatttcctatgtctcagccatctgactgacccggacgcaggctatgtcgtgggatcaatctgcgttgttatggccgatctcactatcgttgcttcatcgagtgatagggagatgttcacctcacgg

SEQ ID NO: 7309 - DNA, 451 bp, Triticum aestivum
  Clone ID: LIB104-021-Q1-E1-G7
attcccgggaccacgggtgctggtcatgccgtcgccagagcagagcggaggaggccgatgcagggtcgaggaggggcacgagtgagggtcatttggttgtactgcatctgccaaagcactattgagacaacgaatttcagctatattaggagctgaaccatattaagtatgtgcatcctgggtggaatgctttctgttcatgagctggcctcccagcatgtactgttgagaaaagaaaagaagggagctttcaagttcttatgaaaagcaagagagcttctaagttctacacactagagctggcgtacacgcgttctcagagctcatgtccagggcttcatcagagctattttctatgctggaaacctaaaacaacaaagattttcaatccacccagactaatcaaaatttgtctaaagtggaacggatggtcgtcacttttgactaagct

SEQ ID NO: 7310 - DNA, 199 bp, Triticum aestivum
  Clone ID: LIB104-021-Q1-E1-G9
cgggactcgagtaaagttgcgtggccaagttcttgttttcaaaaggtttccatataggcgttcagtgtcatgacgttgggaataaaagtctattgctgttcttattaatgcgacgacactagtgtagtatgttgtcaccacgctgcatcagagcgtggtgagtgttgtatgttgtcggtcaggcaaaaaggagatgggg

SEQ ID NO: 7311 - DNA, 432 bp, Triticum aestivum
  Clone ID: LIB104-021-Q1-E1-H1
ttcccgggaccacgggtgctggtaatgccgtcgccagagcagagcggaggacgccgatgcagggtcgaggaggggcacgagtgagggtcatttggttgtactgcatctgccaaagcactattgagacaacgaatttcagctatattaggagctgaaccatattaagtatgtgcatcctgcgtggaatgctttctgttcatgagctggcctcccagcatgtgctgttgagattcgattcactgggagctttcaagttcttatgaaaagcaggagagcttctaagttctacacactatagctggcgtacacgcgttctcatcgctcattggcatagcttcaacagagctattttctatgctggaaacctaaaacaacaaagattttcaatccacccagactaaccaagatttgtctaaattggaacgggtggtc

SEQ ID NO: 7312 - DNA, 449 bp, Triticum aestivum
  Clone ID: LIB104-021-Q1-E1-H2
cccgggtccaaggcgatcacagtgttgaattttggatttagttcactattttgacctggtgaacgagctatttcattgaatcgagatatttcattttgtgtttgattcccattttttagtgggtcaactatttgtcatatagtaaattgctagcaacgagcatgtaaaaacacattactcccgagcatcatctctccgtctaaaaaagaagtggcaagctaatatttcaaaatttgattcacatcgacttggtaaggtatacatggatgctcgttctcccaaattttgaatgatctgttaaacatcctctgctcggtggaattcactcgagcaaataaatgggagacgcaaaattaccgtcctatgtgggacacgcatcaattggcccgttctacatcgagggtaggttcgtaacttcatccaaccgcgccttctcctcggccgaaatg

SEQ ID NO: 7313 - DNA, 396 bp, Triticum aestivum
  Clone ID: LIB104-021-Q1-E1-H3
gggtcgacagggttcctggatctaggcgaaatggaacacttacgaagctgtcaataattctgcaacaaaacatcactggatatttcgtcgctcgagggggttcaagatgatcaaagcgtacatgccattccataccgcgtcagaaaacgtcaagcaggtcaattcactgcacgtcactggacaacgtattatacgctaaagacggggagatacctatcttaacccatctggaacacattgcaggttacccacctttcgtcatacggcttaacgccgaacaggtctccattgctaacatttccgaaaagttaatgaccaaaatgacccactgtgaagcgccccattaccggccatgaatctcatcggtattcacagttacaccaagggtcatcacaa

SEQ ID NO: 7314 - DNA, 446 bp, Triticum aestivum
  unsure at all n locations
  Clone ID: LIB104-021-Q1-E1-H4
cgggtctccattcttctggggacatcagagacgtcaaaaacttatacacattgtgtacactcataaacacattagacccttaacctataagtcttcaatacaccaaaatcaccaaggggcactagatgcacttacaagtcacccggggattcatggatggatatacactttggaccagacacgatgaagagccagtcatggatggatatacccagggctgcgacatgccaaatcccgatcagagtcacatggatgttgaatctaacatcagggctgcggcatcaagctaccaatagaataccgaaaagacaaaaaccccactggaaaaccaagacggcgatgcagaaaatgacgacgacgaccttgatatgccagattttgttgctatgattgctgatttgcagggcccaaaaaaagatatggttgggtacaangacctgccatcc

SEQ ID NO: 7315 - DNA, 438 bp, Triticum aestivum
  Clone ID: LIB104-021-Q1-E1-H6
tcccgggtccacggggagcacaaaaaggcggaggagcacaagaagaaggacggggagcacaagaaggacggcgagcacaaggagggcatgatggagaagatcaaggacaagatcagcggcgagcacaagaaggacgaggagcacaagaaggcggaggagcacaagaagaaggacggggagcacaagaaggacggcgagcacaaggagggcatgatggagaagatcaaggacaagatcagcggcgacggccacggcgacggcaagaaggacggcgaccacaaggagaagaaggacaagaagaagaagaaggacaagaagcacggcgagggccacaaggacgacgacggccacggcagcagcagcagcgacagcgacagcgactgagccagctccggccgcgctccggcagcagcgtgcagtgtaggcgagatcgatgaa

SEQ ID NO: 7316 - DNA, 85 bp, Triticum aestivum
  Clone ID: LIB104-021-Q1-E1-H8
cgggtctacattcttcgctggacatcagagacgtcaaaaacttatacacatgtgtacactcataaacacattagacccttaacct

SEQ ID NO: 7317 - DNA, 265 bp, Triticum aestivum
  Clone ID: LIB104-021-Q1-E1-H9
ttcccgagtcgacaggctcaaggagataatcaaatacaagggattccaagtacctcctgcggaactcgaagcccttctcatcacacacgccgaaatcaaagatgctgctgtcgtatcgatgcaagatgaacttactggtgaagttccagttgcattcattgtgcggattgaaggctctgagatcagcgagagcgagatcaagcagttcgttgcaaaagaggtcgttttctacaagaggatccacaaagttttcttcgctgactcg

SEQ ID NO: 7318 - DNA, 386 bp, Triticum aestivum
  Clone ID: LIB104-022-Q1-E1-A3
gggtcgaccggaacgattaattaaatccagcacgcagacctgcatcacgacagacagcgagcataggaaggggacgcccatttacatttacatatatagccctgctgctcctggcccctttccccagttccatcccattattggttcttgcgaggatggggcggagaaacggaagcatgaagcggagaggagatcaggcagcccttcatgcacagagggcggcgagggagggcgcgatggcgtccaagaggatacagaaggtgctcaaggatctgcagtaggatccccccacctcatgcagtgcaggtcatgtgggtgaacatatgttccactggcacgcaacaataatgggcccatctgacagcccatattctggtggacttttc

SEQ ID NO: 7319 - DNA, 169 bp, Triticum aestivum
  Clone ID: LIB104-022-Q1-E1-B11
taccggtcctaagatcgcgggacgtatgtgacatcacaagcaacgagctgggcacggtgatgctgtcgctggggcagcgcccgtcagaagaggagctgcgggagatgatcgcggacgtggacaccgacggcaacggcgtcgtggaattctccgagttcctgaacctcct

SEQ ID NO: 7320 - DNA, 453 bp, Triticum aestivum
  unsure at all n locations
  Clone ID: LIB104-022-Q1-E1-B2
ccgggtcgacgggggattcttgatcctgctggacgtgatgcgactgttctgaaagaagctctaagtgctgaaagtcttgatctgaaagcagctactgatataatatgttccaggacaccatcacagctgcaaataatgaaacagacatattatgcaaagtttggtacttatcttgagcatgacattagtcagcaagcatccggcgatcatcagaagatcttactagcctatgttggcattccacgctacgaaggcccggaggttgatcccactatagtgacacatgatgcgaaggacctctacaaagctggtgagaaaaagctgggcacagatgagaaaaccttcatccgcatcttcactgaacgcagctgggcacacatggcagctgttgcttctgcnttacatcacatgtatgatcggtcgttacagaaggttgtgaagaatgaaacatct

SEQ ID NO: 7321 - DNA, 406 bp, Triticum aestivum
  Clone ID: LIB104-022-Q1-E1-B3
gggtcgaccggtgaaaaattctcatcatagtcaaccccttgaacttgtctataacccttagcggcaagccgagctatatagatggttacattaccatccgcgtctgtcttcttcttaaagatccatttattttctatggctcgccgatcatcgggcaagtcagtcaaagtccatacttcattttcatacatgtatcctatcttggatttcatggcttccagccatttgtcggaatctgggcccgccatcgcttcttcatagttcgaaggttcaccattgtctaacaacatgatttccaagacagggttgtcgtaccactctggtgcggaacgtgtcctcgtggacctacgaagttcagtagcaacttgatctgaagtttcatgatcatcatcattaacgtcctctc

SEQ ID NO: 7322 - DNA, 378 bp, Triticum aestivum
  Clone ID: LIB104-022-Q1-E1-B5
gacggggaagaagaagaagaggaagaagaagaagaagaggaagacgaagaagaggaagaggaagaagaagaagaggaagaagaagaagaagaagaagaggaagaagtagaagaggaagaagaagaacaagaggaagaagatgaagaagacgaagaagacgaagacgaagaagaagaagaggaagaagaagaagaagaagaagaagaagaagaagaagaagaagaagaagaacaagaagaagaagaagaagaagaagaagacgaagacgaagacgaagaagacgaagacgaagaagacgacgaagaagaccaagaagacgaagaagaagacgaagacgacgacgacgaagaagaagacgaagacgaagaataagaagaa

SEQ ID NO: 7323 - DNA, 429 bp, Triticum aestivum
  Clone ID: LIB104-022-Q1-E1-C10
ggggccacgggtatttttaaatatcacatgatatgtgttttgcctggagcgtcaattgatttcctttgtgttgcttgttgtttgaataaagataccaagatctgaaattgttgaatgggagagtcttcacgggggttgcctacttaattgactactcattgatctttacttatcatctttcggaatagtttgttgtttgctcaaatgattcacttatatcttttacagcacggcgggggatttagtttaaggaaatggatgaactctcatgcttcacttatatatcttctagagtcctgaacagcatggtgatttgctttgggtatgaatttagtcccaatatgatgggcatcgaagatggatataataaacgactttcatatagagtgagttgaaaacgacagaagtttgattccttatgattgtttt

SEQ ID NO: 7324 - DNA, 138 bp, Triticum aestivum
  Clone ID: LIB104-022-Q1-E1-C3
cataccgagaggttgctgtcatccgtagacatgaggtcttcttcatatgcttgagcttaaaattgattgaatcttaccaatgtactaacgtgcagcatgtcataccaaagtgattgtcttggaaataacaatttacat

SEQ ID NO: 7325 - DNA, 301 bp, Triticum aestivum
  Clone ID: LIB104-022-Q1-E1-C5
attcgcgggtcgacggggaatgctatgaaacctgctacaaggagctgaccaatggcggcgaaaaactcgacaatttgtgcaccagcaaagagggctcggacgacatcggcatggcccagctccccgaaatccgcagcttcaacaaggggaacaaccgggcccaaggccaattggaattccaaaaggttcccccttgcaattgccaggagacaacccgacaatttcccaaggagaaccaatgccaaaaaggcaatggtggtcctgaatttgcccgttaccaaattgcccaattaaggaaaaa

SEQ ID NO: 7326 - DNA, 398 bp, Triticum aestivum
  Clone ID: LIB104-022-Q1-E1-C7
ctcgtcggtcgatgggatacactaaactgagtcgtattactggcgaaaccacaccacctacacacttcagtatcccagcatcaacaaacctgatgcataatcctgtgatattaacatctggccacacttacgaaataaaatatattcagaaatggttcactgaaggatacaacacttgtcccaagacacattaaaagctataaaactttgcgatgattccaaatacttgcatgagggatctcatttgcaactggtgcacagagcatggattcacaatctcagattttcttccaggcaaagattcctacagttatttgccagagcaattgcatggtcactctatgtcaagtttgcacaatgtttcagtacctctaattgctgggaatgccaggaatttt

SEQ ID NO: 7327 - DNA, 372 bp, Triticum aestivum
  Clone ID: LIB104-022-Q1-E1-C8
tcgcgggacccggcgttcgcgcagcggctgcggaagatgtgcccgcggcccaagccggacgacaacccgcagcaggcgcccaaggtgaacttcgacgagcgcaccggggagaagctggacaacgcctactaccacgagctgctggcgcggcggggcctgctgacctcggacaacacgctggccctgtacacgcagacgaggccgctggtggagcagtacgccaaggacgacgcgctgttccatcagaggttcggggaggcgatgcagaaggtgagcaagctggacgtgatcatcaagaagaacaacgggcagatcaggcgggactgccggatggtgaacaaagccatcgaggtacgctggatgcccatccac

SEQ ID NO: 7328 - DNA, 238 bp, Triticum aestivum
  unsure at all n locations
  Clone ID: LIB104-022-Q1-E1-D11
cgcctgcaacgtacggtcgtaaattcncggggccaccgacggtaacacgacactgctccacttcgtggttcatgagatcatccggtcaggaggcttcaactccgacaagacagggaacgttcctgacactgtaaatcccagggtcgaacagttcaagaaggatagcctcaccgtgcttgcaaggctcagcaatgttccctcacacatggggaaagaatgtacacagagaatggcgaca

SEQ ID NO: 7329 - DNA, 443 bp, Triticum aestivum
  Clone ID: LIB104-022-Q1-E1-D2
gggtcgacaacttgcggcagaatgcggcgaatagggttttcccggacgcgtcgggcaaacgggccggcccataaccaggcaacaagcgatattaaaaatgactcgaaaaagaaatgcgcacacaacagtttcgaacacgcgacctcatgcttactagcggccacgccaacaatctgacctagctcctgaatatggccaattgaagtgcaaattttaaagtacaatgtacaacgacaaatcaatttttttccttcaaaatttccaataattcttgcaaacaaatgtaaacgattttccttaaatatatttgaaaatcgtgaataaatatcgaaattcgaacaaacacttaaaacccgaacaattattgaaaacgtgaccactattttgaaattccaatttattatatacgttattttttgtaaaatatatattaaacaattttt

SEQ ID NO: 7330 - DNA, 323 bp, Triticum aestivum
  Clone ID: LIB104-022-Q1-E1-D5
gataaagtatagtttaggatttaaagtcatctgatcagaaaatgtaggattcatatgctatcaaacggttcaatcttcatgttccaagtaaagtggtcataagacttttaaactgtgtttattgtcctattgatgtatatgggtaaatttaagtctagagttaaggatcataggttatgtaaatttatctattgtctcaaaagtgctaaactacagatgctagataagtagcgagctttggggcgtatctaatgtcgaggaacatagtaaagatgtcatttgcacaagaagacacacaccaatctcaagttcagtttgcacat

SEQ ID NO: 7331 - DNA, 423 bp, Triticum aestivum
  unsure at all n locations
  Clone ID: LIB104-022-Q1-E1-E1
acggtccgagatatcncgggtcgacaacttttatctagcatccagtcctacaaggtagggggatgcaagaacagagggacaagatccaagtcacggtctgcaaacacttccataaggggggcaatttttgcaactagaagattaggggggaggtacagagagggaaatcaactagttctaaaactaaaagaagttcatggccagaaaattttggaacaacaccttttacctttttgttttcacttgggaaacttgcccaactatgccaatttttttttgcaattctccagatttattgcctggtcagcacggagaattgcagacacatttgcgttttcaaaaaaatattccccacgattttatgtcttgatttctcgtcctttttactatgtttttcattgtgcaaggagagcctcccaacgc

SEQ ID NO: 7332 - DNA, 203 bp, Triticum aestivum
  Clone ID: LIB104-022-Q1-E1-E12
atgtaacctaagcgcgtccgtgaggatgagccgttatggatgggcttcaccaggatcagcatttgtgatgacaacatgtcctcgggggagcactttctgaacttccatgtgagccttcgccaactcttcagggtttttcatgagctccgacataggccacaccaaagtggtcgatgaggattcactaccaggctccaaagtat

SEQ ID NO: 7333 - DNA, 449 bp, Triticum aestivum
  Clone ID: LIB104-022-Q1-E1-E3
cggtcgagaaatccgggtcgacgggactatcatagaaagtgcataaaacactaggatcaatttgatgcttgataattgttttgagatatagaggtggtaatgttagagtcatgctagtgggtaattatgaaattgagaaatacttgtgttgaagttggcaagtcccatagcatgcacgtatggtaaaagttgtgtgacaaatttgttgcatgaggtgctattttaatggtctaccctatgagtggaggtcgggattgcgcgatggttaactcctaccaacccttcccctaagatcatgcgtagtagtactttgcttcgagggcaagtagacttttgcaataagtatatgagttctttatgactaatgtgagtccatggatatacgcacactcactcttccactttgctagcctctattataccatgcaacttttcgcagtatcatgcat

SEQ ID NO: 7334 - DNA, 348 bp, Triticum aestivum
  Clone ID: LIB104-022-Q1-E1-E6
cgacggggttgacgcaagtgcgacgtataatctgatgacatgcttgctcatcatcatgatcctgtttgacaactttacttcgtatagtacattgaaacatgaactcagcaagtgcaacaccacacagtgatcaaattcggcctggggcaaaggtatctcgggaagaattgtactcagctttcggtcataatcgatagccgctagtggcatggcaacattgacaaggacatcagcacttcaagttgagtgccatcaagtaaatgacagtgtacaattgcttcagtagatggtaaaactctgcgtctcagtgatgacggatttgggcacagtccatttggtaatttaagt

SEQ ID NO: 7335 - DNA, 260 bp, Triticum aestivum
  Clone ID: LIB104-022-Q1-E1-E9
ggcggagctctaccggcgagcatagatgggggctgttcatcgcgaccaagtgatctggccgctgagcagcgacgccatggacgcgatgattcgggagcagagcagcttctgtgaagaaataactaaacaggatcggtgctcgacaatgttgtggccgtgtgttgggtgtgattgtttgtttgttgcactggctgcattcactgggtgggcaccacgatctatacgataatgtgtacgttcgtacgtactgtattcctgaa

SEQ ID NO: 7336 - DNA, 407 bp, Triticum aestivum
  unsure at all n locations
  Clone ID: LIB104-022-Q1-E1-F10
tacggtcctaaattcncgggtccacgggtagcctctagagggacgagcagagtagcaggaggatgtaacctaagcacttccttgatgatcatctgtaagtaatggagttcaccaagattagcatttgtgatgacaacacgtcctcgaggtagcactttctgaacttctatttgagccttcgccatctcctcagggtttttcatgagctccgacatagcccacaccaaagtgggtcgatgaagattcactacgagctccaggtatgtcctagaaataagagtgcatgcatatgtggacatagataaaacagatagtaattatgacaaggtaaatagatgaaacatttacatcagaggtgataaaatacctaaccaaggttctaccgacaatcgtagacttacgagagg

SEQ ID NO: 7337 - DNA, 269 bp, Triticum aestivum
  Clone ID: LIB104-022-Q1-E1-F12
tggaaaatccaccaatcttgcaaaggtcgcttattggcttcttcagcataacctcagtgtcatgatggcagcatgcgataccttcagatctggtgctgttgagcagctgcggactcatgctcgcaggcttcagatacctatatttgagaagggatatgagaaggatccagcagttgtggcgaaagaagctatccaggaagccactcgaaacaaatcagatgttgttcttgttgatacggctggccgtatgcaggataatgagccactca

SEQ ID NO: 7338 - DNA, 120 bp, Triticum aestivum
  Clone ID: LIB104-022-Q1-E1-F2
caaatcgacagtagcatccgttttccccacaaatacagtatatattatagaggattatgtttttaggagtcacgttcatttggtacacccaagttacacattcgtgacattttctacccc

SEQ ID NO: 7339 - DNA, 248 bp, Triticum aestivum
  Clone ID: LIB104-022-Q1-E1-F4
ccggggtcgaccggcaagacgaacgactctacggagggcggcggcatacaagaggggccggaagaacggcaagaagagcgtggacacctacacgatctacatcttcaaggtgctgaatcatgtgcaccccgacatcggtatctcctccaaggccatgtccatcatgaactccttcatcaacgacatcttctataagccccccggctaagccgccaaactcgcccgctacatcatcaaccccaccatta

SEQ ID NO: 7340 - DNA, 77 bp, Triticum aestivum
  Clone ID: LIB104-022-Q1-E1-G10
gaacaatttgaaagaattcctttgagatctcttgtacggacctacgtatgaatcgttcaaatttgatgatgttcctc

SEQ ID NO: 7341 - DNA, 426 bp, Triticum aestivum
  Clone ID: LIB104-022-Q1-E1-H11
cggggcccagggaggcggtcaaggtacataacgcgcgacgacgacgacgatgatgagaggaagccgcggtacaagaagcacgacgacgacgatgatgaccacgagaggaggccgcggtacaagaaacgtgacgaggacgacgatgatgacgattacacaaagccacgttacaagaaacgctacgacgacgacgacgatgatgataggaagcctcgttacaagaagcacgatgatgatgatgaccacgacgatgatatgaagcagcgtcgcgggaacaaccgccgccgccacgatgacgatcactgattatgacatgagtttaagcttaccctaataagcatagttgcggcggctttgcatccatgaattacgacatttcactttttttccaagcatttttcatttcgctgttcaactgggcaacat

SEQ ID NO: 7342 - DNA, 367 bp, Triticum aestivum
  Clone ID: LIB104-022-Q1-E1-H4
ggggagcacggccgaaatcccggcgaggctgcggcggcggttgaagtcctcctgcacggaccgggggacaaggaggcgctcgatgccgtggataacaccttcgggcctgagcacggcgtcggggcccttgacggcggcgtggccaacgcgcatggttccgttggcgccggcggcgacctcgacgtcctcgccggaaagcgtggggtgggaggccgcgggccaggaccccgccgggtggcgcgccgggaggacgtggtagaggagcagcgtctggaacgacttgaggttgcggggctcgagcaagaagcgcttgaactccgggtcgatgtcccgctccagcgcctcgttccggggccccaagattgtg

SEQ ID NO: 7343 - DNA, 419 bp, Triticum aestivum
  Clone ID: LIB104-023-Q1-E1-A10
gtggtgggtgttccgcgcacacccaccagggatgccacgcgcactatacgatgccgggtactgcgccaccgatgtatcctcgcagttggagttgttgtctgatgacagtggtgtggctgagcgaccacgagtgaccagcgccattggtgattatgggagaagcagacgagataagctacagggagggaggggaaaatgcgacgcaggactcgcgagccgtgagggtttatatagtaggcctgtaagtattggatttttggtgatttcaccgagtcgggtgggaagctcgcgcaggaacctgcgaggttacgcatggaatgagctcactgacgattcattggcaccaccgtttggccaaaagaacgcccccacgcgttgcataagcttgcgttgtacgcctactgcgatagcggtgtgac

SEQ ID NO: 7344 - DNA, 476 bp, Triticum aestivum
  unsure at all n locations
  Clone ID: LIB104-023-Q1-E1-A11
cctgcccgtacggtcgaaattcacgggtccacgggcacngctgcaagaaacgagctgaactgcataggttttgccatacgatgtcggaaaaaaacgtataatatatcaacggattcagcacgaaaatccgcatccgatggagacagcctacgacctgtttggaattttttagaatcgtcaaattcgaacaggaaaaaaagatatggtcaaatttcagttttttaaaaaaaaaattggttaaatttggtcaaactacttattcaagaagtattaatgtgactacataattattcaagaatatgagtgttactaaataattatttcaattttgtgaattttggtcaaactatggtcaaactatgcgtcaagcgtattcaagacatattagcgttactaaataactaacaattttttaaaataacagtttcaaactcacaacgtgaaatgtgtgacttcatgctcaagctaaactcctg

SEQ ID NO: 7345 - DNA, 216 bp, Triticum aestivum
  Clone ID: LIB104-023-Q1-E1-A12
tcatgcaactacctactccggatcccgatccagcctcagcttcacctgacgccggccctaattttgtgtgatcaaatttttgctactagtactaactattgatgatcactgttgcaccatttatttagtttatagcgtcacaactttccactgtctcttttcattctctaccttgttatcgatcgtcggctccagctctatcgaacgatccatgca

SEQ ID NO: 7346 - DNA, 390 bp, Triticum aestivum
  Clone ID: LIB104-023-Q1-E1-A3
cgggaaagttcttgtctccctggtcattgggagcaggggccttggcaagctcaagagggtgctcttgggcagcgtcagcgattacgtcgtgaacaatgccgcctgccctgtcaccgttgtcaagccagcgagtaaccatgcctgatctcagcatcgcaaatgtccacatgtgttttaatttgccagagtcctatatatccagttggccgcaacttattgaaccatccagtgttatttgtaataataattgacaattagcctgtggatgattcccaggtgtgtgtaaacggtgcatgtgtcctgtacatcctgtacatttgtgtgcttatcttcagcctagcttttgctccatgagtcagtccgtgcagctgtttgttgcacacagtttgt

SEQ ID NO: 7347 - DNA, 386 bp, Triticum aestivum
  Clone ID: LIB104-023-Q1-E1-A4
cgggcatcacatgagtgactcctcccaggtcattgggagcaggggccttggcaagctcaagatggtgctcttgggcagcgtcagcgattacgtcgtgaacaatgccgcctgctctgtcatcgttgtcaagccagcgagtgaccatgcctgatctcatcatcgcacatgtcgcacatgtgttttagtttgccagagtcctatatatccagttggccgcaacttattgaaccatccagtgttatttgtaataataattgacaattagcctgtggatgattcccaggtgtgtgtaagctgtgcatgtgtcatggacatcctgcttatttgtgtgcgtaccctcagcctagcttgtgctcaatgagtcagtccgtgctgctgtctgttgc

SEQ ID NO: 7348 - DNA, 395 bp, Triticum aestivum
  Clone ID: LIB104-023-Q1-E1-A7
cacgggaaattcattaaatggataaatgcatttgccatgttatgggtacttaaaagaaaaaaaaaaaaaaaaaaaaaaaaaataaaaaaaaacataaacaagaaaaaaaaaattgaaaaaaaaaaaaaaaaaaaaaaaaaaaaagggggccgcccaaaaggttcaaacctaagttacccttgaaggcaatgtaaaaccccttcaaaattgccaccaaatttaattcaatggccgttcttttaaaaactcctaaacgggaaaaaccttgggttaaccaaattaaacccctttgaagaaaatccccttttcacaattggggtaaataccaaaaaggcccaaacgaattgcctttccaacaatttgccaaccctaaatggcaaagggaacgccccctg

SEQ ID NO: 7349 - DNA, 339 bp, Triticum aestivum
  Clone ID: LIB104-023-Q1-E1-B10
ggtaccaatagtgaatcgtatctctctcggctccccgctccgagtcgcgtcgcgttaggagaaaggaacgaaacccggaaaggtttctccgccgacgcggaaaggggagatagccgggaagggaggcaaaggcctgctcgcggtcaagacgacggccgccaagactgccgagaaagacaaagggaataaggcccccatctcccgctcgtcacgcacagggctccagttctctgtgggccgtatccatcgtcagctgaagcaaaggactcaagccaatggccgtgttggtgctactgcggaggtctactctgctgctatcctggagtacctgacagctga

SEQ ID NO: 7350 - DNA, 433 bp, Triticum aestivum
  Clone ID: LIB104-023-Q1-E1-B11
aagaagcaagaggaccttgaacggctaggcgccgacgcgttcgttgtcagcaaggatgccgaggagatgaaggctgcgatgagtaccatggatggcatcataaacacggtgtctgcaaacatccccatggcccctctcttggggctactgaaacccaacggcaagatgatcatggttggcctcccagagaagcctatggagatccccccctttgctctggttgctacgaacaagaccctggccgggagctgcatcggcggcatgagggacacccaggagatgctcgacctcgccgccaagcatgacgtgacggcggacatcgaggtgattgacgtcgagtacgtgaacacggccatggagcgccttgccaaggcggacgtgaggtatcgattcgtcatcgacatcggtaacacccttgacaaagccgccgccg

SEQ ID NO: 7351 - DNA, 440 bp, Triticum aestivum
  unsure at all n locations
  Clone ID: LIB104-023-Q1-E1-B12
gggtccagtgcacgttgcgcatgaagatgaaggctatacacctcgttcttccttcccttcggtctcactatgcagagaaattgaagctacagcttctaacgctgtctaccactgcaaaattggttcagttgatgcagcagcaaagatacggtacctagatacccggcgtgcttctaatgatgaagtanaaacatttgaatacaagcttcttggggaagtacgaatgatgaatgctctaaggaagcacagatccatagtggacatatatggtcaccaactttcttctaaatgggttcaagatgatagtgataacgagtacaggataatgcagtctgtaattttaatggaatatgtgaaacgacgttcactgaacggctatttgacanaactactgagagacggcaagaaacatgtacctgtggacctggcattttacattg

SEQ ID NO: 7352 - DNA, 405 bp, Triticum aestivum
  Clone ID: LIB104-023-Q1-E1-B3
cggcgagtgattcagctaagcaactagcgagtagtagtagtaaactctgcatattaggtttgacgaagtcaaacttcctaaagtttgaccaagtttatagaaaaatataaacatttaccataacaaatatgtatgatgtgaaagtacattcaataatgaatctaatggtatttatttgttattgtatatgttaatattttttgttataagctttctgagagtttacaaaacttgactttgaccaatgctaatacgcggacttaaataaaaacggagggagtacacatttgttttcttagtttgtagtgaacgaatcatttgttgaaattgtgaaataaatatattaggctattgacttcgaatgtaatggtctatacaattcaatagttacaatcaatggtgaat

SEQ ID NO: 7353 - DNA, 365 bp, Triticum aestivum
  Clone ID: LIB104-023-Q1-E1-B4
gggtgcacggcgacacatccagcgaatccggaaatgaatactgctcctccggtctgcgcatgacgttagtacatctgcgtactgccgtgatatttaccagtggacgaccaatcgatatgtttgcgcgatcaccatatgtggaaggattaactcaactaccaaatggccccgtgcgaatgggtgtacacgtactgtagtaattataacactgcagaatcaagtgtcgtatgcaacttgtatcaggaagttctccgtatcaatatcgtgtacgggtttgctaagactcgagtaaacatttgttttcttagtttgtagtgaacggacgcacttgatgatcctggcatacgtatgcatgcagccaacgt

SEQ ID NO: 7354 - DNA, 388 bp, Triticum aestivum
  Clone ID: LIB104-023-Q1-E1-B5
gtccacgggatgatattaacttccgcccctgatgattggcaaagcttgcaacaatcatacggttagtatgcaatcatcattggatcaacgtttgtgccaagtataacagatgcgatggactaccatgataattgatttgagtctactgattgccagaaacattgcgagcacgaacagacattagttaagtcacatgatcgtaattatgccttgaacagacgctgtatcaaggacctcatagatgcgaatgatgattacagcaccaaaagtttgcataatgtacagactgccacagactgtactgtgcataacatattcagcttctcgtatgatggatgctcattctatcacgactatcgcaatgaaattatccgatccacctgcccga

SEQ ID NO: 7355 - DNA, 344 bp, Triticum aestivum
  Clone ID: LIB104-023-Q1-E1-B6
ttcgccggtccacgggtccaaaataccttcggcatcagaaaagtgcgtacgtggtgggcagtctcacgaatgtctcgatgatgtgaataacatcctgttgtttggttcagatcgaagctgtagcacctggatgatgcatgttcctttatctgtacagtgtgatgttgtgaatttggtggggtttgagaattcgtcagttgagttgccctatgctattcaataacaacatcattgtttagtgcactcatggatgcgactgatgaatagagcagctaaaatttgcacaaaagacagtactgtcacggactgtactgtgcatgacatattctgcttttcgtgtgttg

SEQ ID NO: 7356 - DNA, 450 bp, Triticum aestivum
  Clone ID: LIB104-023-Q1-E1-B7
ggtccacgggatcactgcagtgtgctgatgccgcatggggcgtcaaattaatgcaacccctccacaacgccgtccataaaggccatgtttcattggcagagcctttcccaccattttgctctctctctctctctctctctctctctctacccttggctagctcttcacagtgctatataaggggcctcacctggcgagccattcttcctaccacccacccaccatgatgtccatgcatacctccccacctctcctctcctctagcgtccagctgccgagcccgagccacacctgctctcggcacgccatcggcaaccggggcttctttgctgactgtctgccgaggctttcctccacagccaggcgttgtcgtccactccgttggctcaagggcggaacctcccagggcactgcgtcccgctgattcacggcctggctctaccctctctg

SEQ ID NO: 7357 - DNA, 436 bp, Triticum aestivum
  Clone ID: LIB104-023-Q1-E1-B8
ttcgcgggtccacggggtctgttcaatcttctacagaatatagtcctcatcagagatcccgaggactccacaaagtactatccccgctttaacctggaagatacttcaagttttagggacttggatgaacatagcaaaaatgtccttagaagattataccatgactattatttcgttcgccaagaaaatctttggcgacaaaatgcactgaagactctacctgttctattgaactgttcggatatgttggcatgcggggaagatcttggccttatccctgcttgtgttcaccctgttatgctagaactcgggttgattggattgcgtatccagagaatgcctagtgaaccaggcttggaatttgatattccgtccaagtacagctatatgacggtttgtgctccctcatgtcatgattgctccacattacgtgcct

SEQ ID NO: 7358 - DNA, 385 bp, Triticum aestivum
  Clone ID: LIB104-023-Q1-E1-B9
ggggataaggaaagtgacgtctcggagggcgaataggaaatctcggaaggagaggagtatgacaaccccaaggccagtgacgccaagaagaaacaaatatgcgagggtgaggagaatggcgaagatgatgaggaagaacaagaggagcacgacggtggaggatgtgacgacgatgatgatgatgacgacgatgatgacaatgaggacgacgacgatgatgacgacgatgtcgctgctgaatacgatgaggatggagtataagaggaggatgacgaccaggacaacgacgatgatgaggaggacgatgacgaggactcgctccaaccccccaagaagaagaagaagttaagcccttcgaagccgctgccttaatcaccatgccatt

SEQ ID NO: 7359 - DNA, 333 bp, Triticum aestivum
  Clone ID: LIB104-023-Q1-E1-C1
ttttgttaagttaagcgagtcacgtagcatgcaagtatggtataagttgtgtgacaaatttgttgcatgacgtgctcttttgattgtcttccttatgactggcagtcggggaccaacgatggtcatttcctactattctatacctcttggggcatgcgtagtagtactttgcatcgagggctaagtcgacttttgcacttatctatatgagttctttttgactaatgtgagtccatggatacacgcacagtcatccttccactttgctatcctctattagtagagcgcagctttcacaggtctcatgaagcctttatttttcttctacaactc

SEQ ID NO: 7360 - DNA, 435 bp, Triticum aestivum
  unsure at all n locations
  Clone ID: LIB104-023-Q1-E1-C11
gtcgggtacggaagangtttcggacgcgcacgacgggggtctatggttgtgcacaaaggctccggtttaggcagcagggaaaatcacgaccatggttggagatgacgaattaagataacaaaggcagtgggatattttgcaagtgtgtcatggtgaatgccatattaacgaaatatctatgatagctccatcaatattatgaggatatgttataaagagaaatcaccattgtgattatccctcgatttaaattgactgaggatccatacaattcaattacatgagttgcatacattaaatgagatgatggcatgatgacatgatgcaatgcaacaagcaactaaaacacatggcaaagctcggaataactggaagtcttctggggcgccgggctcggggcgttacaacactccactactacaggaggatctcgtc

SEQ ID NO: 7361 - DNA, 420 bp, Triticum aestivum
  Clone ID: LIB104-023-Q1-E1-C12
atctgcaaggaaattgagagcatacaggctgatgaacacatcgacatttggcgaattagcctcactcccttttcaattttgacgacacaatatgatgaagaatagtcacagtctgaatatatgacacttacagtctccacgtctgtatcatccagcatcattggtgcaaggtccgagagccgaacctccttggcctccacctgagttggattggacgcctttgccacctgcacacgcatacacagaagagacatgataaccataccaaatcacttttttatttattgcatggatggcagggcaattctgaatatgaagtgactccagacacttaattctattgaaccatcaaaagagatgccacactttagtttctacaaaaggcccctagtcaacatattaacatcaccggcaatgttt

SEQ ID NO: 7362 - DNA, 391 bp, Triticum aestivum
  Clone ID: LIB104-023-Q1-E1-C4
cgggtttcgccatgtgtttcatttgtgcccgcccttttatttgtgcattgcatcatgtcatcatgccatcatgtcatttcttttcttaactcgactaaataaattgcatggatgttcggtccatttaaatcgatggatattcacaatggtgatttctcattataacataccctcccaatattagggagctataatacatagtccatttaattggaagccaccgctagagacttgcattataaatccctctcatttctaaattattttgcatccatgatcttttctccgcatggctcctttcaagttgtggcacattggcattatgctgccaagtggctacttgttaattgtcagctcaattataaaatatttggaccctcaaatattttct

SEQ ID NO: 7363 - DNA, 466 bp, Triticum aestivum
  Clone ID: LIB104-023-Q1-E1-C5
taccgagtccataattcgcgggtccacgggttacatagaaggatcataaagcaaagctcaaaactagatcatactaaagctttattctactagatcaagattttactaaaaggatcgaactaagaaaaacagtaaagataggagtgtgatggtgatacgataccggggcacctcccccaagcttggcagttgccaaggggagtgcccatacccatgtgtttatgtctctttcttcggaggtggtgatgtgatattcttggcgatgatgcccctcaggatacaattctcttcctcgagttattgacttgctgcttaaggtccattatttccttacggagcttgcccgtgacgactaaagctcctttcaccaatggatgttgtatagctgcgggagaacaagtaacactctttttcatattttcataagaaagaaatctaacattagaaaggatgaccgagtttggga

SEQ ID NO: 7364 - DNA, 466 bp, Triticum aestivum
  Clone ID: LIB104-023-Q1-E1-C6
ttcgccggtccacgggttacatataaggatcataaagcaaagctcaaaactagatcatactaaagctttattctactagatcaagattttaccaaaaggatcgaactaagaaaaacagtaaagataggagtgtgatggtgatacgataccggggcacctcccccaagcttggcagttgccaaggggagtgcccatacccatgtgtttatgtctctttcttcggaggtggtgatgtgatattcgtggcgatgatgcccctcaggatacaattctcttcctcgagttattgacttgctgcttaacgtccattatttccttacagagcttgctcgtgacgactaaagctcctttcaccaatggatgttgtatagctgcgggagaacaagtaccactctttttcatagtttcatacgaacgaactctaacattagaacggatgaccgagtttgggatagctgagctctgt

SEQ ID NO: 7365 - DNA, 462 bp, Triticum aestivum
  Clone ID: LIB104-023-Q1-E1-C7
attcgcgggtccacgcgcttgtgaaaaaagttaggcctgtaattccattttacatcacagccatgaacaagacaagtcatctgcaaggattacgctgccaaataccttccacatgaagaacaattcatcacactctgccatcctcataagagcaacatatgggtagacaatttgaaggttatcactgatggttcatgcatgctttctgttggctggtcgtgcttcgttctccacaacgagttgcgggaaagtgacatctgcctatttgaagtatcgaaaaacgacggtgaagtgacaatggttgttcattctcttgaaggaggtcatcacctacaagggaaagagcccgaatctcaaaacaagtgcagttatccagttaaggtcgaggtgaccgacgaagaggagagtgacaaagaacatgccgagtccagctactactactcaaggtatgcctatgacctg

SEQ ID NO: 7366 - DNA, 432 bp, Triticum aestivum
  Clone ID: LIB104-023-Q1-E1-C8
attcgcgggtccacattctcccgcaggaaagcaacgagcgcgctttcctatttggggtcaagagtggcgctgatggtgaaggtaccagcagtgccatcctccttggcagacaccttcttagtctcaggtggagctgccattgccttcttacacttgccggtggagctcgatggtgcgtcctcgacggtagcgcagcactccgaggaggtgcgcttgccggagttggcatcagagctcttgccggactgggtcttcttcgtccccccgggagcttcagcggcaagtgtcctctgttctgcggcagctactacttcccggtagatcttgtcggcacaagtaagagcatccttcttgtcgccagggacaatgatgacacttatgacgccgagcattttcagtacgttgtacgcatagtgagaggctgctatgaac

SEQ ID NO: 7367 - DNA, 439 bp, Triticum aestivum
  Clone ID: LIB104-023-Q1-E1-D11
gggtccacggcgtagcttaaaggggttaaagcgaacaaaggacgcagagagtttttatactggttcggcccctcgcggtgaaggtaaaggcctaatccagttgttgtggaattactagggtttcgatgaccagggagagaatccgctatgcctggctctcgagttgttgtttgttgtccctaaaccgccgtcgggtcgtccctttatatacacaggttgatgcccgacggtttacagaatcccgaggccggctcataaacgtgtccggctcggtttctacctttcctatcttacaacacaagttacatatgatatggcggtttaggtctacatgccataacccgcctctaggccctgagccttcgtaaagcgccacactccttgtcctcatgggcttcaaatataaataactcattatggggataacccggactctcct

SEQ ID NO: 7368 - DNA, 375 bp, Triticum aestivum
  Clone ID: LIB104-023-Q1-E1-D2
cggggccacgggcgggacgaactttgttgccgtccccaatacagcaagagggcacataggcggcgcattaaatacgtttgtcctacagtgtcaggtgatcaacttgtacactgtagatactttccacctcctgtgtgccactgtggcgaccgctttgacatataaaaggaggcccgaggcgtactgtggaaggattcggactttttggactgggcatgcatggcagctagttcaagagctcaagaacaccaaatatacacagacaagcaggactagggtattacacatcgtttgcggcccgaacctgggtaaaaattcccttgcgttactcgtctagacctgctctttgcgcagcccttcacccccgccaactgt

SEQ ID NO: 7369 - DNA, 452 bp, Triticum aestivum
  Clone ID: LIB104-023-Q1-E1-D7
catcgacaacgcaaagaagcataatgctgggacaagcaaagctgctcatagcaccacatcgctcaatacaaagaggcttgatgatgatacagagaatcttgctcatgagcgtgtgccgtcagacctgaagaagagcattatgcaggctagaacggacaagaagctcacacaggcacagcttgcacagctgatcaatgagaagccacaagtcatccaggagtacgagtcaggcaaggctatcccaaaccaacagatcatcggcaagctggaaagggctcttggcacaaagctgcgaggcaagaagtgaagctgcgtgtgcatctgacaggagtcgaggctttcaagagagcttggctgggcaagtttaccgctaaataaagcttgtctactaaatcatgcgacttaagaaaaccccggagtttggtatttcgctcaggtttgggtgaatgtaa

SEQ ID NO: 7370 - DNA, 347 bp, Triticum aestivum
  Clone ID: LIB104-023-Q1-E1-D8
tgatcacgtttctgggacaaacttcgcgtgatcactgcacgacttcgactcatttgaaagacgtgtgaagagttaagtgacaatctggcacatgatcgtatctcgtcggacctaacttagaacattacgcaagctagatccgtcaatcagctcatatacgtacatcttgcacatctcatcagtgtcaagcaactggtcatctattagtacaagtcaggcaatgctttcttatcacgaatacatcattggtatcctcgaacatggatcatggtaccgtaccgtcacgtcttactcgaagctgcgtgtgtatctgacaagagtctacgatttcaatacagcttggctgg

SEQ ID NO: 7371 - DNA, 394 bp, Triticum aestivum
  Clone ID: LIB104-023-Q1-E1-D9
tgcgcagtataagagaggctaacaatggtggaagggtgaaagggtgcttataatccatggactcaacattaatcaaaagaactcatacacttgttgcgaaaatttagaagtcatcaaaaatcaaaacactacacgcatgctcctagggggatagattggtaggaaaagaccatggctcgtccccgactgccactcataaggaagacaaacaataaataaaattgtgctccaacttcatcacaaagcggttcaccatttgtgcatgctacgggaatcacaaacttcaacacaagcattctttaaattcataatcaccccaactaccattgctttgatactatcacctccatatctcaaaacaattatcatgcatcaaacttatcttagtattcaa

SEQ ID NO: 7372 - DNA, 434 bp, Triticum aestivum
  Clone ID: LIB104-023-Q1-E1-E10
ggtccacgacgtggccggtcagtaaggtgcaatacggtgctctacgatgagctagtgatcgtataatcaccgcaaaactatatatactgaccgtaaagagcgtattgttacatacgttgaccgccagtgtatttttctcatttcaaattaagccatattaaccggaaaggacgcagtatggactagtactagtactgctttgatgtgtcccatcaactcgccgaacgaggagaagcttgcttactacgcctctccctcgcccacgtgcgcggtggttcgcaggacgaggagatggttttgagtacagcgccctctccctctccctcgccctcacagtggacgtgcagcagttcaattggtgtcagattgccagaagcataatgtgtactgtagtatcatcattgttggaccttctgaagaggcgacgagccaag

SEQ ID NO: 7373 - DNA, 453 bp, Triticum aestivum
  unsure at all n locations
  Clone ID: LIB104-023-Q1-E1-E11
gggtccacggcgggcgcataagtaaataagtgaaaaattatctttagttcaccgaccgaatattcccttaagaacgctagctttcgacttcacccagtctgaggtacacatccggctgacccagcagtaacaatcgcagagggctccccttatgccctagccgaattaacgggaacgtanggcataaatacaagagccaggcaacctagcttggccaaaacttaagtcatatcgatgcatataatggtgaataacgggtacatgccgaatgataacacatgtgttgggcataaagcccgtatgaataagcttctgttaaagaatcccccaggtataatgagcgcggatagcgcgtcagttgcgtgcaaacaaggcatgaatgggctcctaaaggctgtgagagaaaaagaaaaggagaaggagaaaaatataagacagatagtgtataaaaat

SEQ ID NO: 7374 - DNA, 430 bp, Triticum aestivum
  unsure at all n locations
  Clone ID: LIB104-023-Q1-E1-E12
tccacggcacctcgttgaactgcagatgcacaaaacatagtgtaccacctccttcctcaacccaaaatttgaatttttccaccaattgcaaaacctggaagaataaaaaaaaaggtcaaacaaccaaaaggaacctaaccaatcataattgccctaagaacaatggtctcaggttcaagtcaagaggaaggccttgaatgcccatttgctgtgaatccttcaacatcgtanagaacgttcttatgtcntgtggtgtggtcacacaatgtgcaagaactgcatcttaagtcttcagtgggctgttgtcaagttcncaacccttcctatccagctgcctctctttgtctcgtgtccttggtgcaacctattatctttccggctggtgtacaagggcaacctcaagttcccacgtaagaactactttctgctg

SEQ ID NO: 7375 - DNA, 412 bp, Triticum aestivum
  Clone ID: LIB104-023-Q1-E1-E2
ggctatcctttgatgatcgtgacagcttttgatgggctaagttcggacacccctgcagggtatgaacttttgagaaccgtgcccacggttatgtggcagaagggaatttgttaatatctggttgtagagaacttggcacttgacttaattaaaatgcatcaatcgcgtgtgtagctgtgatggtctcttttcggcggagtccgggaagtgaacatgttttgggttatgtttgaacgtaagtagtttcaagatcacttcttgatctcttccagcttcacgaccgttgcgtagcttctcatcttactcttacttgcgtatgttagccaccatatgtgcttagcacttgctgcaactccacctcattaccttatcctaaccataagcttaaatagtcctgatctcgcgggttttg

SEQ ID NO: 7376 - DNA, 402 bp, Triticum aestivum
  Clone ID: LIB104-023-Q1-E1-E3
ggcgtaacgctcaaacacatgtccattaacgatgtgtgggtcaatgaacccaacatcatggatgttccttactctgcattccttaatcttcattctgcatgtataatatcggacacaacaatatagttaggacatatatatagtgcaggcaatatgaacgagatgggatagaaattaataaatcacttacagaacgtagcaactgatgatagatttatcgagctcgcgcagattgaaaagctggaacaattcactcagttcaatttgtacatagtaatgtttgaagtgatgctcatgtctaacttccgcataaatatattctttggcgtatttattttttatgtaacccttgtaccatttcagcagacctttcatttgtggaggtagatccttttcctgcgc

SEQ ID NO: 7377 - DNA, 452 bp, Triticum aestivum
  unsure at all n locations
  Clone ID: LIB104-023-Q1-E1-E5
ggtccacgggtctgcaacaatcaaatccgtatgtatcttgcaaatctctatgtctcccacctggacttgatcccggatggaattgaagcgtctctcttgatgtgcttggttctcttttgaaatctggattcctttgccaaggaaattgcaccagtattgtcacaaaagattttcattggacccgatgcactaggtatgacacctagatcggatatgaactccttcatccagactccttcatttgctgcttccgaagcagctatgtactccgcttaacatgtagataccgccacgacgctttgtttagaaatgcaacaactaacagctccaccattcaatataaacatgtatccggtttgcgatttagaatcgtcccggtcagtgtcaaagcttgcatcgacgtaaccatttacgatgagctctgtngtcacttcataaacgaagaacatatc

SEQ ID NO: 7378 - DNA, 105 bp, Triticum aestivum
  Clone ID: LIB104-023-Q1-E1-E7
cgggtttaaactaatcatatcgatatgtgtcatgcaacgctataagtcgataaagtgaacttgatgtcggatggagcttatgcgtcacgcatgtagtgcgtgggt

SEQ ID NO: 7379 - DNA, 456 bp, Triticum aestivum
  Clone ID: LIB104-023-Q1-E1-E8
aattcgccggtccaccaactcctgctgcttaatgaggccagtgagtatgtcgtcatcgccggccaaggacttcagcaatgccagctcatcgcgatcgccgacacggcgagtgcgcttgtgagagcccagcgtgcccgcgagagcttgtttgagggcttcgtggcgcgccgagatatctctgttgcggctgcctctacgcggcgggacctctctactgcttacgtggccttggtctttgctgcctggttatatgtccacccgaaactcctcctaccggtcatggcggaatgacttgacaagaaagaccagttttgtgggtgatgaggagaggaactgtgaagtgatttttgagtgggtagtttttatagcctggtgctaagtgtgaacacatattagtttgatctgtgtgaacgtatttgcaattacttattgcgttgtaatctgcagtgtgacgag

SEQ ID NO: 7380 - DNA, 439 bp, Triticum aestivum
  Clone ID: LIB104-023-Q1-E1-F10
ggggccacatcgacatcgccaagaagcataatgctgggacaaacaaagctgctcatagcaccacatcgctcaatacaaagaggcttgatgatgatacagagaatcttgctcatgagcgtgtgccgtcagacctgaagaagagcattatgcaggctagaacggacaagaagctcacacaggcacagcttgcacagctgatcaatgagaagccacaagtcatccaggagtacgagtcaggcaaggctatcccaaaccaacagatcatcggcaagctggaaagggctcttggcacaaagctgcgaggcaagaagtgaagctgcgtgtgcatctgacaggagtcgaggttttcaagagagcttggctgggcaagtttaccgctaaataaagcttgtctactaaatcatgcgacttaagaaaacccggagtttggtatttcgct

SEQ ID NO: 7381 - DNA, 438 bp, Triticum aestivum
  unsure at all n locations
  Clone ID: LIB104-023-Q1-E1-F11
gggtccacggcgcaggatctacatagacgatgcaggatggggtcncgatgccgattcgatcgagtacgggtaccgggtccccttcggtggcatacacgtcttcattggcaagatcggtgagcctgggcctgagccggacatctgcaccgacctcgtcgagacggctcagcgtgcaagatctacccaggttaaaccggccatgaagcgtgccttcattggagtcatccacggaggagagcgtgacgacgaatcagaacactgtagcgagaccatcgtctattccggcgacgaatccttgaccggagagaccgaatcgctataccagttgcaagacgaccagattaggggctgttctgatggcgacagtattccggaccccccgggccaggtcaaccgggttggaatattcatggccggcacacatgcggcgaatcactc

SEQ ID NO: 7382 - DNA, 368 bp, Triticum aestivum
  Clone ID: LIB104-023-Q1-E1-F12
cccaattaacaaactcccccaaaggcttcccccaagccccggctgaaaaaattaacaacattttccacaaagggaaatgaattcccaccataaaccattaccggtaaacatacaggttaaaacccggtaccaaaggtccaagcagcaagccatcacccccccatgagccaaggaccctccttttccttccttattaatctagagatcccttttttgtttaacctaatcggacatgaagcttcctcaagcttgtttttcattggctcttgctaaggtttggtcaagttgtcagctccaacatgtggtagctatgaacttatgatgatgtatgtagtacagcatggctgcatgagttttcttattcttgc

SEQ ID NO: 7383 - DNA, 457 bp, Triticum aestivum
  unsure at all n locations
  Clone ID: LIB104-023-Q1-E1-F2
cggggccacgggtttctgacatgacatgacggtggaaagtgaaccacattgcgcggcgcaacgctgtgcattgcacaggagcgagtgtctcgcgtaaaagttaactcgctaatgctagttgaccattagacgtgagcatgccacagttgcgtgattagggaagacttttgctctgtcacacaaagcacatgtggctaagctgttccgattttctagcatgtggagcagataaaactgaagtgccaggttagtggtgatggtttttaaacacaacgacagtgttgcatttgctggtcaaaacggacagacgaattancatgaaacagattaaacttgcttagtgaagtgatagctaatgtgaacaaacttgggtcttcgctggccgccaatgctccacgtcngcacttgacanactggttccgccagccaacgttgctccacggcatgcatgcacatg

SEQ ID NO: 7384 - DNA, 281 bp, Triticum aestivum
  Clone ID: LIB104-023-Q1-E1-F3
ggcgagcacacagagaagaaggacaagaagaagaagaaggacaagaagcacggcgagggccacaaggacgacgacggccacggcagcagcagcagcgacagcgacagcgactgagccagctccggccgcgtgcagtgcatgggagatgaacgcgtgggttaatttggagcgtgtggtagcatatgtatgtaatgcttgacatgtctcatggatcttgtaatgtaataaccggctgcactgcatggtgcttgtaataataacgttaaggaatttccattggt

SEQ ID NO: 7385 - DNA, 221 bp, Triticum aestivum
  Clone ID: LIB104-023-Q1-E1-F4
gcatcctaggcgaggtgaccgtcatctggttgctgttcgagggaatcggctaccacctcctcaccttcctctgccacttgctcatcgtcttcctcaccgtcagcttcgtctggtccaacgctgcatccttcatcaacaggtccccccaaaagttccctaaggtcattttatctaaaacccaatccctgttaaaaccccagttcctaagaaaaaaatccatt

SEQ ID NO: 7386 - DNA, 447 bp, Triticum aestivum
  Clone ID: LIB104-023-Q1-E1-F5
attcgccggtccacctccgcagacgaagtgcagcgcatgatggcggagatcgacaccgatggtgacggcttcatcgacttcagcgagttcatctccttctgcaacgccaacccggggctcatgaaggacgtcgccaaggtcttctgaatcagttcatttcacctcagccgtccgatccaggagccgatccatctacgtacggcttcgtatatcaatttcatgcaactacctactccggtcccgatccagccccagcttcacctgaggccggccctaattttgtttgatcaatttttttgctactagtagtaactagtgatgatcactgttgcaccatttatttattttatatcgtcacaactttccagtgtttcttttctttctctacctttttgtcgatcgtcggctccagctcgatcgaacgatccatgctgctaattgtttgtg

SEQ ID NO: 7387 - DNA, 451 bp, Triticum aestivum
  Clone ID: LIB104-023-Q1-E1-F6
cacggggtcatgtaaaatggtacggttcacggagtctataacgactgggaggagtgtcggagacaggttcaccgattcaacggtaacagttacaaagggtacgccactaaggccgaagccgaatctagacaccaccgccatctaacgggagaggggacggagcgttggaggaaccggatgacgacgagtttcatcgtgatgaccgcagctctcttctatgtgatggtactttatatgatcgatatctacttgtaatgtgaagacaaactcgcggtctcgagacttgtaatataatgttctatcattgttcggtcttttcaattcggagactaatatgatgacttgtattcgaagactaaaatcatgaattgtactcacagactaatcatctactgtactccatgaatccattgtttaagtgtgctgtccatattttgtccaatatacattt

SEQ ID NO: 7388 - DNA, 280 bp, Triticum aestivum
  Clone ID: LIB104-023-Q1-E1-F9
acatggtcgagcagactcctgagatcccctgatagtgcctccagcggtttcggcggtagcatgggctcgcccgtgagatggaacatggccgcacctttcacgggtacacgctcttcagaatgcatcgtctggctgctatgttcctctggctgtttgggaggcaccaaccttccccatttcctcctggcccttttcctggggacaacctggcgaaccttccctaacccctggcccagtgttcccgaactaagttctgttcgacactcgcgccccgactagt

SEQ ID NO: 7389 - DNA, 383 bp, Triticum aestivum
  unsure at all n locations
  Clone ID: LIB104-023-Q1-E1-G1
ggggccacggcgaacaaggaaaggagcggcaggggtgcagctgtgtgagggcactggtctcgcgcgtgaggagcgcctctcctcgggaggaccggaanggagcgagtcaaactcatatccacttcagagcaaggtgggtctacaactgctaatttaaagggattcgattgtccctcgtctgagcataagcatgataaagtgcagcaactgacttggcttattgttttggaaatcgcaaccggtgctctcctgcttgtttttgtgattactggtgtcgttactgcctacagaagctgcaatctaaagccttctatacgaatatcatcatggagcagatcaaaaagttggagcgccgagataacagtactgattggccaataacg

SEQ ID NO: 7390 - DNA, 434 bp, Triticum aestivum
  Clone ID: LIB104-023-Q1-E1-G11
aggcgctcctaagatcgtagaaggctctgattaccaacttgtaacgccctcaatgcggctatagctcccacgtgtcaaggcacgacttaaaggcataaccgcattgaaagcaatgtcgcaagtcaggcaatcattacaacatcccatgtaatatataataaaagggggagataacatagttggcttacactcgccacgtcacatcagagtacataaataacatccatcaaacaaacactcatggccctactacggcgccaaaatagaaaagaacccaacatgcgacaaggtcctgaatcgataaccccaactaggcaccactactgatcatccggaaaggacacgtagtatcgctgagagtcctcgtcgaactcccacttgagctcgtaatcgtcaactggagcagaaacacctggacctgcatctggagttgt

SEQ ID NO: 7391 - DNA, 460 bp, Triticum aestivum
  unsure at all n locations
  Clone ID: LIB104-023-Q1-E1-G3
cggcgaggtcggagaggcagcaacggcaaggtaatcgacgatgaaggacggtgccggacttggagttggaggatgatggcgacggcttcagggcgaatccggccgagtccttgcgcggggaaggagatttcaaggttgcggacctcctggacaaggttgtttcctgcggggaggccggtagccgtgcttgtggtggtcctcctgtgggctgcaatttgcaccgtgagtccgtcggtcctagctccagctgcaccgtggcatcacggcgctggagcggcgcggctcaagatggcaatggggccccgaaacccgcgtccccgcgggtttttaccctattangggacggggatgggcgtctttttaaccccatggggctgctgctgggtaaattataaaacccaacatgtttcacgggtttaaacccgtttgagcaatacccgaacccgaaacccgccatccc

SEQ ID NO: 7392 - DNA, 449 bp, Triticum aestivum
  Clone ID: LIB104-023-Q1-E1-G4
gaaaggatctgtcaaatatatcatcagtatcaatcactatatgacaccacacaacagatatgctgctgtcagcagtgctctctaaatagacactgcaattatcttatacatcattactgttgtcagcaatgctctctaaatagacactgcaattatcatgtacatcattgctgctgcaataaaccactaagaattattcaatatctagcctagcgccttcgttatcatcaaccgagggttgaggcggagttacaaaatctgaatgagaaaccaagggattgtccaagtcagcgacatctttgttatcttcagagctgttagaagcagctgagatggcgtcacccgattctgaatgtgttctgtccacatatgcttcgggtaaggagctctcggccacatcagcatcgccgttatgccgagcaatcagatcttctcttctgacaaaatta

SEQ ID NO: 7393 - DNA, 242 bp, Triticum aestivum
  Clone ID: LIB104-023-Q1-E1-G5
gggtttaactgaaatgagtcgtagtaagctacaagaacagcagatgacaggatttccccttggaggattatcgtcaccgatttaaggcgagtccggccgagtcattgccctgagaacgagatttgacggttgcaggcctcctagagaaagttgtctcttgcgtggaggacagtagccgtccttgtggagtgcctcctgtgcgctggaagttacaccgtcactgcgtcggtactacactccaa

SEQ ID NO: 7394 - DNA, 418 bp, Triticum aestivum
  Clone ID: LIB104-023-Q1-E1-G6
acgggagctccggaccgactgctcagcagtcggcccgaatgtcgggggctacacccagcgggtgcgctgacgcgcccccacgaaaaagaagacaaagtagtcgccggaagatccggcccgactgctcaacagtcggcccgaatctcgggggctacacccagcgggtgcgcttacgcgcgcccgcgaacactaagacttagtcatcatcggaagatccggccacactgtcagcagtcgacggttaacgcggaggcacaacctctcaggtacactccaacggattgtccaagtcagcgacatcgttgtcaccgtcagatctgttagaagcagctgacatggcgtcacccgattctgaatgtgttctgtccacatatgcctcgggtaaggagctctcggccacatcagcatcgccgttatg

SEQ ID NO: 7395 - DNA, 392 bp, Triticum aestivum
  Clone ID: LIB104-023-Q1-E1-G8
gtccacggggataaggatggtgacttcgcggagggcgaagaggaaatctcggaacgagaggagtatgacaaccccaaggccagtgacgccaagaagaaacaaataggcgagggttaggagaatggcgaggatgctgaggaagaccaggatgatcaggagggtggaggacgtgacgacgatgatgatgacgacgactacgacgatcacaatgacgacgacgactatgatgacgatgatgtcgctgctgaagacgattgatatggactacaacacgacgatgatgacgattacgatgatgaggacgatgatgacttgctccagcccccgattaagaggatgaagtgaagcccttcgactcggctgctttagtcaccatgcgatcagatgtgcct

SEQ ID NO: 7396 - DNA, 341 bp, Triticum aestivum
  Clone ID: LIB104-023-Q1-E1-G9
aggcatccaagttaggtataataaaaactatcataggaagtgaattggatgctatgatcaatttgatacttgataattgttttgagatatggaggtagtgatattaaagtcatgctagttgggtgattatgaattgaaagaatgcttgcgttgaagttagcatgtcccatagcatgcacgtatggttaaagttgtgtaacaaatttgaaacatgaaatgtacctggcttgtgcatccttatcagtggctgtcggggactaacgattgtcttttcgtaccaagattttcctctaggagcatgctcgtagtacttgacttttgatgacatctaaacttctgta

SEQ ID NO: 7397 - DNA, 464 bp, Triticum aestivum
  Clone ID: LIB104-023-Q1-E1-H6
gggtccacggggatgaggaagacgactcgctacaagtagagagcacatcagtgggcttatccatgacacgtggacggtgagtgtaatggaaaggaaaagagggaagagggggaatcaccgaaggtgatggagatggagacggggaagacatcgatgataaaggtggagacgaggaaggcatctgtgatgaaggtggagaattggtgttggtgtcaccccagaagctcaaagattatttgatgcattgtcgaagacgcttccagttcattgggacaagaccgacattgttgtaatgaaggaggttcgtgtatgcagtccctacctgcctgaaaatgtcagcggcggaacatcagctgctaatgaacgggttaagaaagtgctggactttgagaggaaaagacaacatgtgcgtgtacctggccaattctaacttgttcgacttgacaattttcacctcaactcct

SEQ ID NO: 7398 - DNA, 452 bp, Triticum aestivum
  Clone ID: LIB104-023-Q1-E1-H7
ggtccacggggcaagatgaaaataatttttgaagggtatcccattgtttatttgttggtggctcttggtggaaatacctattgttgtgtaaattcaaacgatgtaacctattcttgtaatgtaaccaacatgcactcaatctctataggtgcaatcaaaacaatgaagcaaaaaaacagaggaaaaatagagcctatttctctaggcctctttaatctttgtgggccttcgacaatcaacgcaatgcgatggcccaactagagcttggtttcattttgggcccaataactacatttttttctcttgcacttggtgttgtctgacgaaactgaaagtgtcaaaaactaacacctatagagattcagagacgaagatagagacatagtttaagcaacacagagagcacatgatccacaaattgagcaacacaaagagcacatgattcactaacc

SEQ ID NO: 7399 - DNA, 403 bp, Triticum aestivum
  Clone ID: LIB104-023-Q1-E1-H8
cacggacatggacagcaccaacggcacctacgtcaacgagaggaagctggtaccgggattcccggtcgccgtccaacccgggagcctcctcatcttcggtgacatccacttggcaatgtttcgggtgaggaagacaatcgtcgatgtggcagccgatgccaccaaagatgaccagcaggaagctgagactgtgctggcaagtgcagttcaagaaacaagctagtctaccttacctttcaaaataagagtgcaaaatagtgcatcatggtaatatgcagtccccgtctcaggatcaacgaaatatgtagctaggcagaaatagcatgtacgagtaaagagtaacttgcaacatgtcatgctcaaggaacaggtcattcaaacaaacacacgctaaatttcacgc

SEQ ID NO: 7400 - DNA, 462 bp, Triticum aestivum
  Clone ID: LIB104-023-Q1-E1-H9
cggtccgagattaccggggccacgacgacaagatgatgcatggtggtgtccggcgctgcgacggcgtcgtccacgacaaggaggtcttcgccggtgtgatgccgcgcgaacaggtggttgcggtgtgatgccgctaggaggagatggcagtgcgacgctgccatgacgaccgtgcgatgccgacaagacggtgatgagatgccgctgagaagatcgatgtacagcgggtgaggccatcatgaggatcgatgtgaagctagccgcggaggtgttctgggtggtgtgacgccatccccaagatgaggtgttgcgacgacgacggcaagacgtacgtgaccagtggtgtgatgctgctgaagaacgttcaagtggagattgatgatgcaccatggtgaagctgcagcgtgaggcaaggtggtgtgatcttgccgctgcaaagtcttggcaagatgttgcgggtga

SEQ ID NO: 7401 - DNA, 445 bp, Triticum aestivum
  Clone ID: LIB104-024-Q1-E1-A11
tcccggggccacgggggcgagaaacgagtgaaatcgacgggttgtgctagttgagtaattgtgaatttgagaaatgcttgtgttgaagtttgcaagtcccgtagcatgcacgtatggttaaagttgtgtaacaaattagaaacaagaagtgtacctggcttgtgcacccttatgagtggcggtcggggacgagcgatggtcttttcctaccaatctatcccctaagagcatgcgtgtagtacttgatttttgatgacttctaattttttgcaataagtatatgagttcttttgactaatgttgagtccatggattatacgcactctcatcttttcgcctttgctagcctcttcggtaccgtgcattgccctttctcaccttgagagttggtgcaaacttcgtcggtgcatccaaaccccgtgatacgatacgctctaccacacat

SEQ ID NO: 7402 - DNA, 456 bp, Triticum aestivum
  Clone ID: LIB104-024-Q1-E1-A12
ttcgcgggtccacggggaggttgagaagctgattggcaggatagtgaagtggctgaagcccggtgggcatattttcatcagggagtcctgcttccaccagtctggggattccaagaggaaagtgaacccgacgcactaccgggagccaaggttttacaccaaggtgtttaaggaatgccactcctatgaccaagatgggaattcctttgagctttctctggtaactcccaagtgcattggagcttatgtgaagagcaagaagaaccagaaccagatatgttggctatgggagaaggtcaagtgcacagaagacaaaggctttcagagattcctggacaacgtgcagtacaaatccactggaatcctgcgttatgagcgcgtgtttggggagggttatgtcagcaccggtggattcgagaccacaaaagaatttgtggacaagctggatctgaaagc

SEQ ID NO: 7403 - DNA, 335 bp, Triticum aestivum
  Clone ID: LIB104-024-Q1-E1-A2
ggtccacgggcttataagtatggttatggcctactagattgatctttcttgcaatgggagaaatgcttacctttgggttcaatcttgcggtgctcgatcccagtgacagaaagggaaacaacacgtattgtattgttgccattgaggataaaaagatggggtttatatcatattgcacgagtttatccctctacatcatgtcatcttgcttaaggcgttactctgttcttatgaacttaatactctagatgcatgctggatagcggtcgatgtgtggagtaatagtagtagatgcaggcaggagtcggtctacttgtgttgaagtttgtgattcc

SEQ ID NO: 7404 - DNA, 309 bp, Triticum aestivum
  unsure at all n locations
  Clone ID: LIB104-024-Q1-E1-A4
gggatactcgagatggcggcaagctttgcacaggccgctccgctgaggcagtacaaccaataaaccttctccccaaagggggtaaaaaggaacttctccttgaaccctttgtaaaccctaaggaacaaattcaaaacggtttacttcaaccttgcggcctgacgctgcaagatcacttgcgccttggtacaaacaaaaccggaataacacacgccctctttcttctcatgtataccgtagtttacaacaggcattanaagaggaaatgagtttgtttcttctggaatacttcgaaatttcaactaaata

SEQ ID NO: 7405 - DNA, 423 bp, Triticum aestivum
  Clone ID: LIB104-024-Q1-E1-A5
ggccacggcactgctcatcactttcaccttagttgctcgatactactgggttaccatcgagtgccgagggttacacctcttcagcacttcgaatgttaacgttgtcatgtatctattcggtcgtggtcatcgagggtgatttcctccttaaccacttcccaagtctcagaaaggtaacgatgctatctttgtcgtcatcgaccaattctcgaaggttgctcactttctgccagtcaaggagactatcactgctagtcaattagcacacttgtatatctccagaattgtgtcactccacggtattccgaaggagatcagttcagaccgtggaagtattttcactccgaagttctgggatagtttccaagaggcaatgggaactcatattacctggagcactgcttatcatccccaatcccaagc

SEQ ID NO: 7406 - DNA, 142 bp, Triticum aestivum
  Clone ID: LIB104-024-Q1-E1-A6
gggtagacatgatcgaattagttcctgtaccacaatatgaacataccaaacaattggatagtttgtatcaaatttttgtggcacttgctaccttgatttgaatggagacaacggtgtagcacatattcaaagcagcacacaa

SEQ ID NO: 7407 - DNA, 423 bp, Triticum aestivum
  Clone ID: LIB104-024-Q1-E1-A7
cgattaatattaaaccctcctctgcggtgcctctttttctcccgtggatgacaatggcgacggctgcgcgtaagctcctgacggatggctcttcctcacgcacgtgactggcagcaactatggtggtgcgagagcctccccacgcgcgtcaccaccctcgagatcgcagactctggtagcgcacacacagcaaccgcacagagccgcagtggacatcacggtcctgtcgccacgcctagggtccgcagcgacagggtcggcggcaaatctaatccatatccactggtttcagcagtaagctgacgtctcatacatcaccccgttcatctcccatcttgctccttgacaaattagattgttctaccaatttttttttggtgattgtggacgaccaagataaggataagagaaagtaatcataaa

SEQ ID NO: 7408 - DNA, 455 bp, Triticum aestivum
  Clone ID: LIB104-024-Q1-E1-A8
ggtccacggggataattccacggatgaagacgaggacactgacagctgctcgacgcctctgcccccgccgccgccgcccggtatggagtgggagtacacggacccaatcactatgcgccccttggattttcttccatcttcgttggctgatcgggacgataaacaagtggtctcacaagtcagcatggatgacgattgggtggaaacgaacatagaatttgatggacatgatgaaagcgtctctggcaatgctgatggcatacttaggcgtgtggaattgcatccagcatagagtacggttatgggtgatgtaaactcatcaatgatgagcagctgggtaacaaaggactcgaactcttcggtgatggcctgggcgactgacaagtcactggtagaaatagccaaggagattgatgagtacatcgtgaaagcagccgcaagtgggactgatgttg

SEQ ID NO: 7409 - DNA, 417 bp, Triticum aestivum
  Clone ID: LIB104-024-Q1-E1-B1
acagagcaaaatcaaacatctcatcgaaagacgggacacctccgcctctatcaagcggtatcagatttccaggttgctcggtgagattttacagtttttcgtagtttagatcgagtctgttcttcatatctacagtccacgaaaaagccacaaaaaaatttagggttagttcatcatatccgaaccaatctgagcctttgcataatctttttaaggtttttgctttgttgaatttgcggttgcatcgtcggtctagttgctggtcttagagtctagtcttttagagtttcgagttctggtcataagttgtcacgccgccgccacaccatcatcatcgcccctgccatctaccaccaccgctcatccgccaccgctccgaattcgtatccatataccaccaccaatccgtgtccatat

SEQ ID NO: 7410 - DNA, 442 bp, Triticum aestivum
  Clone ID: LIB104-024-Q1-E1-B10
ccatagctatctaggtagctcttatcacagtagtatcatatgtgggctttctttagttgcatctgctctgagtgctgcggcatcatctggagaaagggtgagtaccactattgtaggccttggggccgggagtttaccaatgtttcttcatggatgcctccctcatcttaatattgaggtggttgagttggaccccatgatggaggaggtagcaacgaaatattttggcttttcaatggatgagcaattgaaggtgcatttgggggatggaatcaaattcattgaagaaaatgcccattctgaaccaaatggcaaagacagtgacgcagttagaattcttattgttgatgttgaatcatctgatctaagttctgggttgtcttgccccccagcaaactttgtcgaagatgctttccttatgtcagcaaaaaagttcctttca

SEQ ID NO: 7411 - DNA, 448 bp, Triticum aestivum
  unsure at all n locations
  Clone ID: LIB104-024-Q1-E1-B12
cgggaaccacagcacgttacatgctttgcatctgttggaacggcagtgtgttgtgttgcaagatgctgagggattgccngagcagttcntatgcagggaaaggcatggctatgcgagatgtcccgtgatcacaggccaacatatgaagcagagcgccaaagggtcactgagtgtgggggatacattgaagatggctacctcaacggagtattgtcggttactcgtgctctaggggattgggacatgaaaatgcctcaaggctcgcagtcacctctgatcgccgagccagagttccagcagaccgtcctcacggaggatgacgagttcctcatcataggctgcgacgggatatgggacgtcatgaccagccagcaggcggtgaccctggtccggaaggggctccgacggcacgatgaccccgagaggtgcgcgagggagctcgccatgg

SEQ ID NO: 7412 - DNA, 333 bp, Triticum aestivum
  Clone ID: LIB104-024-Q1-E1-B2
cgacggcacggacagcctctacgactgcgaggaggccctgacggacgacaccaacggcgccggcgctaaaacctccgccgaaaaaatcgccttcggcaacctggtccgcttcatctccaaaaaggtgtgggccgcctggacttgaccggcatcccccgcggccgcggctataacttctcgtaaattagggagacccagcaatggagactaccaaaagggtcaggtcaggtcaggtcaggtccgtgaaaccagtagtagtagtagtaccagttggttttgtcccagcaagcaagcaagcaagcaagagcatccgctctctctatgccccctttg

SEQ ID NO: 7413 - DNA, 211 bp, Triticum aestivum
  Clone ID: LIB104-024-Q1-E1-B4
aattttgctggacatgtaccgaaagttcaccaacggtgatctatggcatcgacactagttcacttctgatgcgtggaagattccttctaagctgcacgatcaagcttgtcacactaggataactattgataatctgactgatcatcccttgttcaagaaagggttttaaactgtagtaattccgttaagatcaacaccacatgcttcaaag

SEQ ID NO: 7414 - DNA, 451 bp, Triticum aestivum
  Clone ID: LIB104-024-Q1-E1-B5
actaccgaagtataatggcctgtctggatggctatatgaacattgtgatggagcaaaccgaagagtacgtgaacggccaactgaagaacatgtatggtgacgccttcatatgaggcaacatcgtcctatacatcagcacgtcgaagcggtccctcaccgactgagcatacgccgagtggagcattcacatcatcatgatgtaatttcaaggtcgttaacccgatgattggttgtgatctgactggtgctaccttttgcaatcttgtacgtgttgtctgctgtagtgcctgctgacagagacttatctggaatcatttcgatttgatgttatctgcgtttttagcttggagatgtttgtggctaagattctgcgatcaggatagatagtacatttgtgtgtccatagtcctgtgctgcatataacagacattacgtgtcttaagggacaccc

SEQ ID NO: 7415 - DNA, 389 bp, Triticum aestivum
  Clone ID: LIB104-024-Q1-E1-B6
ggaagaatggaatcgtcctccggaggatcagcggaatgtggatgatgtgacgctggtcgcccgtatctactgaggtcaagtagtgacatgtctcgatactccggaacgagttgcaccatcgtcctcgcctgcatcactgctaagccggctctcatcctgtgatcatatgcgaattacaccgtccacatcatcatgatgtaatttcaccgtcgttaacgccatgactggatgatatctgactgcgttcacccttcttgcaatcatgtacctcttgtctgctgtagtgcctgctgacatcgacgtacctcgaatcacttccacttgatgtggacatcctttttatcttggagatgtttgtcgcccagattctgccattatgacagacagga

SEQ ID NO: 7416 - DNA, 397 bp, Triticum aestivum
  Clone ID: LIB104-024-Q1-E1-B7
cggggaaagccaagagttactgagcaggcatggatggatggatgtttggagcgcgagcatcaactgtggttgtgcataattatggttatgtcagacgtgttaattgtcgcaatttccaattggtggtactatatatatgtttgccaaataatgtgtgcaccgtgtgcaactatggaacagcgaagtggtaatcattttgtgagctttggaacagtgaagtgacacatatttgtcctaaaaaaaaaaaacaaaaaaaaaaataaaaaagaataatcaacaaaaaaacaaacaaaaaatcaaaaaaaatggaaccacttctagatgatcgacctcgacgtacacatctaggaaacttcaaggctctccaattctgccatcaagacacattgcggacccc

SEQ ID NO: 7417 - DNA, 424 bp, Triticum aestivum
  Clone ID: LIB104-024-Q1-E1-B8
cgggaggaaaaaaaaagagagggagacgaagcgagtggacttcagccaaagaggcgcctcgttcggattcagtgtccactacaaaaaaacgtttcagctcccgcgtgacctttcgtatacccatcgtgcgtggcaaaaatttatacatcggcttggctcattcccgcaacccgcgtcgcgtcgcgccgtgacgaggcgaggcgtggcgtggtgtggcgaggcgggcggcggaggaggagtgcgcgtggatgtccctcttgttctcatcctcacacatgtggggaaagaacctcccttataaagagatccaactccctctaaacaagcaatgtgggactaaactttagttccacctcttgccttgtacgaatgggttgtgtgggcctcaggatttattaggaatttttgaaactgctattgggct

SEQ ID NO: 7418 - DNA, 431 bp, Triticum aestivum
  Clone ID: LIB104-024-Q1-E1-C1
gttccaatttcaaaaggagcatttgctcatattgagaaccctctgccaaatcccgctccaaaatttacccccttggcagccaaaccagctaccatcattctctcaggattcggaggctttttcagcttcagtgatttctcaaacaagcccattaagcagaactccaacaagaagaatcccaacaacctcccccagaataaaggccagtctaataacaatcatgaagcgatgagcaatgactggctggaaaatggtcaatgccctcttgcaaagtcatatatagcaattggtggagtcgtgcctcttgtcgcaaaactgctggcgcccccagctggtatgaaactgacgtgccctcctgcaattgttgctgcccgtgcagcaatatcccgcacggcgtttgcaaaagggcttcgccctcagcccctaccgac

SEQ ID NO: 7419 - DNA, 453 bp, Triticum aestivum
  Clone ID: LIB104-024-Q1-E1-C11
gggtccacgggcatctttacatgacagaaataaggcaaccatcaaacaaaccttcttatcatctggaagatcatcaatgtgtatgaaatagtcttcaacaggcgatgcaacgaccaaatcactggaatgaaaaaggtggaagaatgcggcaccggcatttgtttcaggcagggagaaaaacaatgacagagtatatacgttcgtcaaaatgaaataggggaagtatatttacttacagattgttcagctcaaacatgccaattatatggccatacacctcaagggaaaacactagagcaagttaaggtaactcgaatgacaacgataactactcattgtatgaaagtttgaaacaagtctggtaactgccaaaaaaggatacatggtgcacactcagcatcgaagatcgcatccttgagaagctttagtgactgcaaatacagaagccatgat

SEQ ID NO: 7420 - DNA, 307 bp, Triticum aestivum
  Clone ID: LIB104-024-Q1-E1-C2
gggatttttattagccacatgatatgtgttctgcttggagcgtaattttattttgttagtatttgcttgatgttatttataataatgctttgcatctttattttttcaatcaaatgtcaaggatagcctttaccatgcttattttgcaagtatacatgttgctgtttcaaaacagaaagtttaccgctgttgtaaaaatttcctagaaaagtcagagagtgatataatgttgaatctttttgaataatgagctctgataaatcttttatagcatagtatttttcttataatttttggagttaaggaa

SEQ ID NO: 7421 - DNA, 304 bp, Triticum aestivum
  Clone ID: LIB104-024-Q1-E1-C3
aatatgatatgagcttcacttatatcgcttgagctaaatatttttgctctagtgcttcacttatatcttttataggcggtggattaattttgaagaacccgttcatctatcatagttcacctatatcattttgagactcctttagaacattatgctatttgctatcgttataaattcctcctacaatgatgatcccccaagttgggtataattgatactatcataagacgttaattggatgttaccatcaacctgatacttgatcattgttttgatataaggatgtattgatattaggatcttg

SEQ ID NO: 7422 - DNA, 146 bp, Triticum aestivum
  Clone ID: LIB104-024-Q1-E1-C4
cgtgacgaagcacagtgcgattggcgtcagtgcgccagatcgggtccgtggcggtgcaaccggcttcaatcccccggttcgggtccttggcctgggtcacacccttaccaacaacattgacgggcgctccaaaaactccggcaacg

SEQ ID NO: 7423 - DNA, 425 bp, Triticum aestivum
  Clone ID: LIB104-024-Q1-E1-C5
cgggcatcataaagaacttagtttgcttttgggttatgaagaaatgaaacgtcaaactaagcatattccagcatataaccttgagaaattcctcgatattgatctagaagaaatttatatgtattgtgcggtgaattgcattgaaaacttatattgccaattacataaagaagaggaaacaaatagaagttgaagagaatactaacgaaagggaagagacttcccaatattctcctattatttcttatgatgaatcaggtaacgaggaggagccttatattcaaccaatctcattaataaggagctccaaaaagaggattgaacccacacatgatgtgaagaagaaaaagaaaagatggagaaggaaaggtagaaaggtatctctcccaaatgatgttgctcctattactcattgtgatgatgat

SEQ ID NO: 7424 - DNA, 443 bp, Triticum aestivum
  Clone ID: LIB104-024-Q1-E1-C6
cgggcatattgggagtcgttcaatcagtgaaattccaaagatcccgaagccctcttccatgtgtttatctgaaactgacaatgcaaatgacactaaagataagacccagcgactccatatgccagctggagcgttggttgacattagtaacttcatgggcacacattctggaaatattgaccatgctgttaatgagaagagaagaattgagggaagaaacactgcatcttcctttaaacgcccccgctcttccagataaatcctttgatttgcatccctgttagcaggctgtaaactccttgatgccatgcttttgctatgcccttgctgtcaatgtgagtttgacactgcatgtgttttgcatgctggcgacgtttatttatgcagcagcaaggcagtggatcttttttttcagacggatctaaaatgaagatgattgtctt

SEQ ID NO: 7425 - DNA, 452 bp, Triticum aestivum
  Clone ID: LIB104-024-Q1-E1-C7
gggcacacgggaaatactagggaaaccgtcaatgatgaattcatcaatcgcttatcattgtataccacgacgtgtttgcccagagcacacatggcgtattagcatcaaccatctgtgttattatcggtcttcgcagacatttctaattacagacctagttgccgtgtaccacacacatcttgttaagttgaaccgtttctgttctcttgggtcaacgcaaacagttcatctgagtgaactgtatgccgtatatcgcacacacctttgatctggctgagcgtttctattgtgttgcctaagaaaaaacagttcagttagtgaactatatgccatatatcgcagacaccttcatctggctgcacatttctgttgtcctacctcatcgcaaataggtcactggagtgaaccgtatgccaggtatcgcacacgcaactctatctgaaatgtgtttg

SEQ ID NO: 7426 - DNA, 430 bp, Triticum aestivum
  Clone ID: LIB104-024-Q1-E1-C8
cgggacaagtatagtgaaggccgggttcgccggcgacgacgcgccccgggcggtgttccccagcatcgtggggcggccgcggcacacgggggtcatggtgggcatggggcagaaggacgcgtacgtgggcgacgaggcgcagtccaagcgtggtatcctcaccctcaagtaccccatcgagcacggcatcgtctccaactgggacgacatggaaaagatctggcatcacaccttctacaacgagctccgcgtggcccccgaggagcatcccgtcctgctcaccgaggcgcccctcaaccccaaggccaaccgtgagaagatgacccagatcatgttcgagaccttcaacacccccgccatgtacgtcgccatccaggccgtgctctccctctacgcctccgggcgatacaccggtatcgtgctcgactcc

SEQ ID NO: 7427 - DNA, 437 bp, Triticum aestivum
  Clone ID: LIB104-024-Q1-E1-C9
ttcgcggggccacggggagagcaaacaggagtgtggtctacagtcacatgtgagagcaccaatgaataggggaggctttgcagcacgcatgatcttgccagttctatcggtggctcttctcgtccttgtcagcgttgggatctatggatgggcataatagctctctttatggtgggatttaatgtgtcacattttccccacatcggctgtgatcattgtacatactgtgtcttgctgcctgcgtttaagactgttgtaagacagcgaagtgtttgttccccttcgggcgggggactgtgaaatgaagaagtgaggtaacaaatgagaagcgggatgaagcaaggagcaactgttgctgtagatgcctgtgacttagtacatgctagtttttgttttcctgtcatcacagatgttggcaaccaggttgtagccatcca

SEQ ID NO: 7428 - DNA, 443 bp, Triticum aestivum
  Clone ID: LIB104-024-Q1-E1-D10
cggggctaagtcaacacacgatgaaggctcgaactgtagtaagtacgtacgtaggtgtagcacctcatcttgtactgcacaccatggcgataatgaagaagaacacgagctccctgagcttcgtcgtggccgctctcatcgtggtcatggctgccacccttctcctctcctcgtgcgacgcccgcaaagagaaggataagcccaccgcttcccccgtgtcggggaagtgcttctcgaggtttttcccacactgcaccgatcagcgatgcaagaagttctgcgtcgagccactccccggagccgtctgcatcgacaaaatccactgttgctgccctattgcttagttataagcgtcgttgaagcgatcgggctaagaaatagtactggttaaagatggcaacatgcaatatttgtacacttcgacatatataccacctctgttt

SEQ ID NO: 7429 - DNA, 454 bp, Triticum aestivum
  Clone ID: LIB104-024-Q1-E1-D11
taccgatccaacattcccgggtccacgggagataaagtatgtaaatattgatagatcgaatgccaaataaaataaattgcatcaaggtatttttgggtttttggtttaatagatctgaataaaaatgcaaagaaaaagtagatcgcaaggcaaatatatgtgaaagaagacccgggggccgtaggtttcactggtggcttctctcgagaaaaatagtaaatagtgggtaaacaaattactattgggcaattgatagaacctcaaataattatgacgatatccaggcaatgatcattacataggcatcacgtccaagattagtagaccgactcctccgtgcatctactactattactccacacatcgagacgtatcagcatccccaagcttaattcctacttgccctcgagtaggtaagtgataaaaacagaaattttgatgtggagtgatgttc

SEQ ID NO: 7430 - DNA, 309 bp, Triticum aestivum
  unsure at all n locations
  Clone ID: LIB104-024-Q1-E1-D2
gggcaacgtgcacaccatcttcgaggaggaaggcgggcggccggacgccatcatgatcctgacggtgaagcgcgacaacatctgcagcttcatctcggagaccaaccccgggcacgtgcggtcgtgggagaccaaggacagccagctgacgatggtggcggacgacctgaagccgcgggcggtgctgacgtgcccggagaagaagttgatccagcangtggtgttcgccagctacgggaacccgctggggatctgcggcaactacacngtgggcaaatgccacacgcccaaggccaaggagattgtgga

SEQ ID NO: 7431 - DNA, 327 bp, Triticum aestivum
  Clone ID: LIB104-024-Q1-E1-D4
tatatcaaacaaaaagaagcacgaactgtagtaagtacgtacgtaggtgtgacacctcaccttgtacggaaaacaatgggaatattgaagaagaccacaagttccctgagcttcttcttggcggccttcatcgtggtcatggttgcaacccttctcttctcttcttgcaacccccgcaaggaaaaggataagcccacggcttcccccttgtcgggaaaatgcttctcgaggtttttcccaaactgcaccaagcagcaatgcacgaagttctgcgtccagcactccccgggagccgtctgcatcgacaaaaccactgttgctgcccta

SEQ ID NO: 7432 - DNA, 415 bp, Triticum aestivum
  Clone ID: LIB104-024-Q1-E1-D6
gtttattcctgtttagtaataaataatttatctatcctctgttattattgagtttttatgttttaattagtgtttgtgccaagtagaaccgttgggaagacttggggaaagtcttgttgatcatgctgtaaaaaactgaaactttagcgctcatgagatttcctgccattttttattggagagtgctatttagttaattcttttgcagatgattaatatataaattcctcacgtccagaaatttattttagaatttttgaggtaccagaagtttgcgttagttacagattactacagactgttctgtttttgacaaattctgtttttcatgtgttgtttacttattttgatgaatctttggctagtaaaagagtttataaaccatagagaagttggaatacattaggtttaacac

SEQ ID NO: 7433 - DNA, 461 bp, Triticum aestivum
  unsure at all n locations
  Clone ID: LIB104-024-Q1-E1-D7
ggggtgccataaatgaattaaaatttgatagaatactctatgtgcttcacttatatcttttgagctaagtagttttgctctatgtgcttcacttatatcttttgagcgttataattttgctctatgtgcttcacttagatcttttcgtgcacggtggtggatttgttttaaataaactattgatctctcatgcttcacttaaattattttgagagtcttaatagcatggtaatttgcttaataatgacatgcttggtattcaagatttgtgaaactttcttttgagtgtgttgaatactaagaaaatttggatgcttgataattgttttgagatatggaggtaatgatatcaaagtcatgctagtagagtaattgtgaatttgagaagtgcttgagttaaagtttgcaagtcncgtaacatgcatgtatggtaaacgttatgcaacanatttgaacatgag

SEQ ID NO: 7434 - DNA, 336 bp, Triticum aestivum
  Clone ID: LIB104-024-Q1-E1-D8
gggataggaaggatgcttaatgttgtcgccgtctgctagggattactggctcagctcttcacttctgactcatcatccgcgctgtacggcatcctaccccttcttcttctcctccgtctcctctccctccgacacatacatcattacccttaaggtagaatttacttactccaaatgcattgctctatctgcatctacaccatgaatctatgacgtgtttcaaagacgaaatgagttgcgggagtattacgaacatttgtatacagcattaatctacgatctggttcactgagtagattactggggaaatttgtataccataaatctatgatgtga

SEQ ID NO: 7435 - DNA, 402 bp, Triticum aestivum
  Clone ID: LIB104-024-Q1-E1-D9
cggggcaatgcgaaagcgagaggaggggtcgaactgtgttatgtacctgcgtcggtgtatcaccgcaacttgttactgcacacacggttattgtgaagatgaccacgatctccatgagcatcgacatagtcgccctcaccttggtcacgggtgccagtctgctcttctcctcgtgccatccgctcatcgatatagatacgcacgtcgattcccccatgtctgagaaatccctcacgaggtttttcacacatttcacgcaccatttatacattacctaccgcatccagccactcacctgtgccatctgcatctacgtctaccactgttgctgcgctactgcgtacttatacccctctttgagccaatcgggctatcatcaagtactggttaaagatggcaacc

SEQ ID NO: 7436 - DNA, 344 bp, Triticum aestivum
  unsure at all n locations
  Clone ID: LIB104-024-Q1-E1-E1
gagctgaacaaagtgctggtggccatgaacgagcgcaagcacatcgacccgctgcccgagtgctcaagaatgaaacgcgaacccctccgctctgctgagcagtcgacgagagaaagtaacaccaaaggaaaagaaaacacgtacacacaaagtgaatataaaagtgttcaagactgtgaaccgggaggttcctggtatatctacgttcattgtacttagttaagttgatgttactgttgttttttctcgctgccgccatgccatgagcangccaggcangcagcttctcaaacttgtgttgttgtaacttgtatgatgggagcttaagtacattactttgtttc

SEQ ID NO: 7437 - DNA, 427 bp, Triticum aestivum
  Clone ID: LIB104-024-Q1-E1-E11
acgggatgcaccgaaaggcatcccctctttcgtcttcgttcatcggtaactttacttggagctatatttttattcaccacatgatatgtgttttgcttggagcgtcatgtcattttattttcccttgcttgctgtttgaataaaataccaagatctgaaattcttaaatgttagagagtcttcatatggttgcataattattcgactactcattgatcttcacttatatctttcggagtagtgtgttattgctctagtgcttcacttatatattttagagcatggtggtagttttattttgaacaaatagatgaactctcatgattcacttagattattttgagaatcttaaatagcatggtaatttgcttaaaatcctaatatgctaggtattcaagaataataaaattctcctatgagtgtgttg

SEQ ID NO: 7438 - DNA, 455 bp, Triticum aestivum
  Clone ID: LIB104-024-Q1-E1-E12
ttcgcgggtccacgggccgctaaacatagacaaatattgagggaaatggagcttggagaggagaaagcttaagtagtgtggctcgggcattccatcgaacacatcatgcgcataggaggtgagctagagcaccacaaagccctcccctcgcgggccagaaaaaacagagtagtgtggagtgctctgcttgtcggcgagggggtatatataggcatcacattggtcccggttcgtggttggaaccgggactaaaggtcaccctttggttctggttcaagccaccaaccggaaccaatggtggtgggccaggagcgaggcacattggtcccggttcgagcctcgaaccgggaccaaagatgccagatgaaccgagaccagtgccccacgatggcccggccagccccctggcctcacgaaccgggacctatggccccatgggtcccggttcctggctg

SEQ ID NO: 7439 - DNA, 445 bp, Triticum aestivum
  unsure at all n locations
  Clone ID: LIB104-024-Q1-E1-E2
tctcacaactgaaccgggaaaggaaattgacccagacggcatgaaactcgcgactaaataaatatgtagagactgatttctgcaggactcatcttctttagacctgaataaatatttctcacaaaccgaaattattttacaaagatctgtgtaacatgaagctagcaacccaaatgttgtgtggaagtctgaagatgtggtaattcctgcatccgtaaagtaatcttctgaagatgtggtaattcctggtaaaccttgctccaggccaaaagagtgggtgttgctctccaagaaaaagaaggcttattgattgcttgcttaagtgtttgaaagatatcaaaacaatcgtatacaagattaatgccagggcataattgggagtacttagcaaactggcagctgaaacagaggtgttcccttgcntctactgtccttagcaacatgg

SEQ ID NO: 7440 - DNA, 226 bp, Triticum aestivum
  unsure at all n locations
  Clone ID: LIB104-024-Q1-E1-E3
gcaagagagcggaaagcgtcanggcagccggcgagaaaggggccggccttggttaaccaaaaccccggcaacctccaaggaacctgccaaaaaggcccggcccttgagaaccaaaaccccgaaaaccttcttggaacccgccaaaaaccgggaaaatggtaaaaaggggttgccccccttgaaaaccacaaccggaaaaaaacccaaaaaactcgttgggcccaag

SEQ ID NO: 7441 - DNA, 421 bp, Triticum aestivum
  Clone ID: LIB104-024-Q1-E1-E4
aacgacgaaaaaatgaggctatggtggttatcaatgcaatggtaaggattagaaaaagatttcatcaaggttacggccaaggtatccgtttgaaagcatggacggttgttggcgattaacagtccttggcgaagatgaggagtggtagtgttgatatagcaccgtacctatatagccgaaacacaataggacacgaaaccacaactcaaattctcaaagacaaaaacgggccaaaattgacggggatggtagcggtgaagtgaaggtggttcttgcagaaatcgatggtggtatcggagtgtgtatgcggtggtggagttggaattgaagtgcgtatgccggagtggtggccgtggccgaaaattttcgggcgaaaaaaaagaagccaaggaagccccccccccaaaaaaaaagaggccat

SEQ ID NO: 7442 - DNA, 409 bp, Triticum aestivum
  Clone ID: LIB104-024-Q1-E1-E7
gggcgtactctatatatttactaggcgccatgtcggacaacgacttgtcgggaaattgcttcctgtatcactgtatgtaagtctttagcaaacacttacacatttgcgtgttctacgcacatcgtctagaatttcagtgactttgcgcatcatgacaaaatttcagcagttcacttgcgggaattgccattgtcgcaacttctgagagctcgcgcatggggtgctttccatctgacagccttgtagctgaattcaatccacattcattgtttatgatatcaagttgtaattgttgagttgtaagaaaaaagataagtgtgatgatcatcattaatagagacattgtcacaatgaggaaaagatgatggagactaggagtcacccacaagtcgggacgagactccagaaa

SEQ ID NO: 7443 - DNA, 279 bp, Triticum aestivum
  Clone ID: LIB104-024-Q1-E1-E8
cgggtgtaacttaaatgttttcctctgtgcctggtcgtacatagacttgtctgggacattgcttcgtgtaccactgtaagtgtgtcgtgacgtacacattactagagatgagtgatacaccacaaacgtctatagattcagtgacattgcgcatcatgacaaaatttcagcagttcaattgagggaattgcgattgtagcaacttctgagagctcgcgcatggggtgctgtccatctgacagccttatgactgaattcaatccaaagacattttttatg

SEQ ID NO: 7444 - DNA, 434 bp, Triticum aestivum
  Clone ID: LIB104-024-Q1-E1-E9
cgggcctagctaacagtgggagtagtaggggcgatgaggcctcaatggcaacacagccggccactggaggcaggagcaggcattctccccggcgctggtttgggcggctggtgcatgaagagcagcgattgaagaagcagcaggaccgttcgattcaaatccaaatgttactgttgctagaatcgtttgttgactaagttgacaagccctgcgtacgcgtcaacttagtaggcccacaggtcagcctcccaaccagtgcgccccagatgtcagtgggaggaatcatttttttgcgtaataaggaggcagttgattgcgtgcggccaggccagtggagggagtagggtgggccggggaagcctacgcgacatcacagcgggccacatgaggagggagcaggcagtctcgccggtgctagtttaggcggctggagc

SEQ ID NO: 7445 - DNA, 413 bp, Triticum aestivum
  unsure at all n locations
  Clone ID: LIB104-024-Q1-E1-F1
tccacgggcaagaatatatggaaaatgaagaagatgacgaatttctgaaaggtttcaaggttgcgaacttcgagtacatagatgaggctaaagctttagcagcaaaaaagaaggcacgcaaaaaaaccggaactgaaaccgcatccaataaagcaaactattgggaagaattattaaagacagatgcgttgagcaagaagtagaagaaattgctatgggaaaangaaaaagaagccgcaagcagatggctgctgctgatgaagatgacattactggcctgcacgagttaagttctgaagacgaagattactcctatgatgatgatgtgtcggataatgacacgagtttaccagcaaatgtttctgggaggaangctcagtattctaagaaaaactcacgtaatgtagattcac

SEQ ID NO: 7446 - DNA, 397 bp, Triticum aestivum
  Clone ID: LIB104-024-Q1-E1-F10
ttcgcgggtccacggggacagccaaatcaactacgaggagttcgtcaaggtgatgatggccaagtgatccagccgatgttcatgtccggtggtattattatttttaccggggaggaggaaattgtgcattgcatattagtagtaaggaatgcggctctcgtttccttgtctttgccccgaaccagaagaagcgtactagtagacgtagttgctgaagagcactcatggaatcctcctcccctgctgctaccctgtctctctcccgtgtgtcattgaaacatctttctttctgtgtgaatctgcaagacttggccccttaaaaaaaaaaaaaaaaaaaaaaaaaaaaattaactaaaaaaaaaaaaacaacaaaaaaaaaaagcaaaaagtaataaaa

SEQ ID NO: 7447 - DNA, 457 bp, Triticum aestivum
  unsure at all n locations
  Clone ID: LIB104-024-Q1-E1-F11
taccgatcctacnattccgggtgcacgggcgcacttctacctttccacctttgctagcctcttcggtaccgtgcaatgccctttctcaccttcagagttggtgcaaacttcgccggtgcatccaaaccccgtgatacgatacgctctatcacacataaacctccttatatcttcctcaaaacagccaccatatctacccattatggcatttccatagccattccgagatatattgccatgcaactttccaccattccgctcatcattttcatgacatactttacttttgtcacattgccattgcatgatcatgtagttgacatcgtatttgtggcaaagccaccaagcattatttttcgtacatgtcactcttgattcattgcaccatcctggtacaccaccggaggcattcatatagagtcatatcttgttctagtttcgagttgtaatccttatg

SEQ ID NO: 7448 - DNA, 437 bp, Triticum aestivum
  Clone ID: LIB104-024-Q1-E1-F12
acgggccttatgaaaactagaactggatacttaataaaacacacccttccaagtgccagatataacccggtgatcgctctctaacagggtgacgaggaggggatcgccgggtaggattatgctatgtgatgctacttggtgaacttaccatctattctcttctacatgctgcaagatggaggtggcctgaagcgtagtcttcgacaggattagctatccccctcttattctagcattctacagttcagtccatcgatatggccctttacacatatacccatgcatatgtagtgtagctccttgcttgcgagtactttggatgagtactcacggttgcttttgtccctcttttcccctttctatacctggttgtcgcaaccagatgctagagtccaggagctagagatcccgaggatgattctacgtggagttcggct

SEQ ID NO: 7449 - DNA, 454 bp, Triticum aestivum
  Clone ID: LIB104-024-Q1-E1-F2
gtccacgggctcgtgttcgtgtcatcgttagctcatcaagcacgggcacacattacttaaccccattgttggaagagttgacatttttggtatatatggcccctgccctgttggaacgggtactgtcttaatcagtgacagtatattgttagttaatacccgagatgcagaccttgggcatgataacaccactacgtgttgcaaattgcatctgagggtacgtggctggagtatcttgttgcgtcagattctttttattcttcttcttcttctgaaaatgtacaaaatgaatctgaacgaaggactatgcaaattatcgtgaaatttttatttttttgaaaaggggattgtcgtgaacgttgagaattttaaaaattgaatctgaattttagtacttttacgagatgaaatcgggtctgaaaatggagagcccgacagcgacgtactccctccg

SEQ ID NO: 7450 - DNA, 218 bp, Triticum aestivum
  Clone ID: LIB104-024-Q1-E1-F4
aaatcaaaacataatcacaacgcatgggccaagttggcgcctatgaaagttgggcaaggccaaagagattcgtcccccttgcaccaagctgccagacctaacaagaacatgcaacctggcaatggggacctcccacaagaaggaatgaatgggaatttcctgaaaaaagggcccctggggtaaaatggctaaccccacataatccccaaaaggggccc

SEQ ID NO: 7451 - DNA, 408 bp, Triticum aestivum
  Clone ID: LIB104-024-Q1-E1-F5
gggttgatgtgagacctgtagcatcagtgtcccatagcacatgctgcgtggaacagtttgactgcagcatcagcaagtctcagctgccttttgtgcatcctggtgtcctgattgtcaggtgcatcaattgataccagcacattccaactgtcattaggcatacattgtcatcgatagatatatgcctttgaacttcatcgcagtacatctatgatcactatggcgtaaaacaccaggaggtaccatgtcaattcacacattttgccagcatatctcattgagcttgtcaatctactaagatgatagcagttcttacatcttttataattcgacatcaattactgtgatctataattttacagtgcattgtcacttatcactatagtgttacctattgcacacaacatg

SEQ ID NO: 7452 - DNA, 439 bp, Triticum aestivum
  Clone ID: LIB104-024-Q1-E1-F6
gggcacagtcaaacacgcgtcctacttgtcgccgtccaatggtcgggaactcctccgaggatgagtagggcatgggaggcggcagggcatggtgtgccaactggccggtccgtatcccgtgttctactcttcctcaccggagaccgcaccttcacttcacgggtcttgaaccccgcccccgtacatagagatcgcagatggaggacgttggtcaccgccgtagaataggtttaggatcgggtttcttttatttttctgtcctataaaagttcgaaatgtaatgaaaatctggcgtgtttgcattaatctcggctggtgtatatgaactttcacaataatatacatattgtaggagtactagcaagatgcccgtgcattgcacggaagatcaagatcttgtgggagaaaaggatgaacgagggaaaaccttatctgcaaa

SEQ ID NO: 7453 - DNA, 449 bp, Triticum aestivum
  Clone ID: LIB104-024-Q1-E1-F7
ggggaacatgaagccatgcgtaagatgaaaaatgaatttatggtgaactgggatggtctgagaacaaaagacaaagaacgtgtattagtacttgctgccactaataggccgtttgatcttgatgaggctgttattaggaggctcccaaggaggttgatggtgaatttaccagacgcaaccaataggaaaataattattagtgtaatactagccaaagaagatttggcagaagatgtagatctggaagcagtggccagcttgactgaggggtattcaggcagtgatctgaagaatctgtgtattactgctgcacatcgtcccataagggaactccttgaaaaagagaagaaggagagatccttagcagaagcagaaaacaaatcattgcctcctaagtattctagcagtgatgtccgtcccctaaatatgagtgatctcaaacaggcaca

SEQ ID NO: 7454 - DNA, 274 bp, Triticum aestivum
  Clone ID: LIB104-024-Q1-E1-F9
cgggtagacaccagagggggctatggttacacagagtaggttacagagaaaggaatcttcacatccgaattaccaagctttccttccacgtaaaggagagtcccattcggatacgggatgaagtcttctatcttgtatcttcatagtccaacagtctggcattcgcatatagtccggctgtccgaggaccctcaatccaggactcccttagcaggcactaactagccacttcacaagcccaaattacctgctgggaatggctttggcaggccat

SEQ ID NO: 7455 - DNA, 432 bp, Triticum aestivum
  Clone ID: LIB104-024-Q1-E1-G12
acgggttcagccaaggtatgcggatgtggagccagctaagttgtgcggcggttgcgtcgatttaggcgtgggaggcggcggagtggcgttggagccggccggccagactcacaatcgatggagagggtggtgcggtcgagagcgggaggctgtgacagtggggcgtggcggaggtggtgccgtgcggccggacgggatcatcctggtcgaacaggtcgctgcccccaggctgctcaccggactccaattcccaccgctctcaagctctagatcgagcttcgtctggacccatctatttgtgcgatactgcgtttcctctggtggccatctgttccgctcagcgtttcctctgaatttgagaggagaaggccttgaggaggttcatgcaaccatggactgtttagatgagattagttgagagaaaaggaaaat

SEQ ID NO: 7456 - DNA, 350 bp, Triticum aestivum
  unsure at all n locations
  Clone ID: LIB104-024-Q1-E1-G2
gggacggtgaagatgtacatggacaacaaatccacgatcgagctgagcaggaaccaattcaacaagaaacaagttagcacaaccacaatccgtttcaatacaatcctcaattcaattaaggaaggcttgttgacaatgattatgttagcaacaattgaacaaacatctggacaaaggccctgggggcgcgtcaaagttctcggaagatgcgactttaagctcggcgtcatggaagtatcanacgggacacaggattaagggggtgatntgttgaccttgtaatcctggcgcccttgtatctagtttaagtagttgtttctttgcttttcaaaactctaccgcatgtgcac

SEQ ID NO: 7457 - DNA, 359 bp, Triticum aestivum
  unsure at all n locations
  Clone ID: LIB104-024-Q1-E1-G3
tcgtcgtagtcncaggatctggatttgggcaggttcctggcacatgggacttcaggtgcacgattcttccgcaggaggagaagattccggcaatcatctcccgcttcacggtgttccatgagacgttcatggcagagtaccgtgactaaactggtgttacatgtgtgggattacatgcaagcctcatggattttccctaggcgtttttgcccgcgttgacagcagtatcctgtagatgagacaaaataaggcaaatccatggcttgtgtgtgtgatactatatcagattaccagtctgatgcctttgatggcaaattggcaactgagaatttttatttccacanaananannnnnnnna

SEQ ID NO: 7458 - DNA, 404 bp, Triticum aestivum
  Clone ID: LIB104-024-Q1-E1-G4
tcgacgggttcctcattgttcaagttcagttgggttatgctacttgaatggttcgaaagcacaggtttgaagatgatttccctgcatgtttggttttgcctttcctgctgatccgtttcttccctgaactttcagttatggttgcttatacagaagagagacggtcaatattgtatgcttgtgtatgctagtgaagtggcatgattcatttttcttgtgtgtgcatgctacttatagttcaaaattgttcgcttgtatatgctactgtaagtgcctatgttgaagcacactatttaagtttgttttacacacagaacttcaactagaaacttttgagaaagtacgcccgctttgtttttgtgaaaagttcaagtatgattgtttgaaaagtacaaaaatgaatg

SEQ ID NO: 7459 - DNA, 441 bp, Triticum aestivum
  Clone ID: LIB104-024-Q1-E1-G5
cggggatgaggaaggtgacttcgcggagggcgaagaggaaatctcggaaggagaggagtatgacaaccccaaggccagtgacgccaagaagaaacaaataggcgagggtgaggagaatggcgaggatgatgaggaagaacaagaggagcaggagggtggagggggtgacgacgatgatgatgacgacgacagcgacgatgacaatgaggacgacgacgatgatgacgatggtgtcgctgctgaagacgatggagatggagtagaagaggaggatgatgacgatgaggaggaggaggacgatgaggacttgctccagcccccgaagaagaggaagaagtgaagcccttcgacgcggctgctttagtcaccatgcgacgagatgtgcctgtccttcactgtgttctggaaactttccttagagttaaaaatgcccccacacga

SEQ ID NO: 7460 - DNA, 448 bp, Triticum aestivum
  Clone ID: LIB104-024-Q1-E1-G6
ccgggtcacgggtgatccgtatgatgattgtgatatcaagattaggagggtgaatgttagagctaatcttgatatttgtattagcatgtttgagttttgcatgtagtctagtctagtgtggtgttcgtccgacgaaggtttcaggtgagcgcgccaaggaggtgagatgccaggatgccgtgtgaggcggcgagcacggcgagatgccgatggtgctgcgtgagaagcggcaagacgtatcagaggctggagccgtgatggactgcatcaaattgggtcgggtgaaccggccggtcgttctgtttgttggactagctgttcatgcgtgagttcgtttagtcctagctgagagtatcgttgctagtagttgatgcatgcatgtagttggcctggtcacaagtggttaccgagtcgtgtgcaacgctggagtgatttcaggagtggagta

SEQ ID NO: 7461 - DNA, 401 bp, Triticum aestivum
  Clone ID: LIB104-024-Q1-E1-G7
catgttatcaaaagtaccgaccttagtgagctccgatacatgtagatggtcatcaaggaggtgttaaggttgcatcctccggctccgctgctcgtcccagagagaggagagaggactgttaaatcatgggctataacatgcctaaaggaactaatatcttcgttaatatctttgtaatttctcgggatcccaaatattgggacaacccagaagagtacaagccggagagctttgagaacagcaacgtcgaatattatgggacacattttgaattcgaaaaaaaaaaaaaaaaaaaaaaaaaaaaaaaaaaaaaaaaaaaaaaaaaaaaaaaaaaaaaaaaaaaaaaaaaaagggaaaaaaaaaaaaaaaaaaacaaaaaaaaaaagcggcccctcaaaagg

SEQ ID NO: 7462 - DNA, 420 bp, Triticum aestivum
  Clone ID: LIB104-024-Q1-E1-H1
gggcacaagggcattggaaatggaacggtcagctatggaatggatgatgctgatgacatatacatgcggtcatggactggcaccattattggtcctcacaatactgtccatgagggtcgcatctaccagctgaagctgttctgtgacaaggactaccccgagaaggcaccatctgttagattccattcaagaatcaacatggcttgtgttaatcacgagactggggcggttgacccgaagaagttcagtgtgctagcgaactggcagcgagagtacactatggaacatgtcttgacccagctgaagaaagatatggcggcgacgcataaccgcaagctagtgcagcctccagaagggacattcttctagcggggtgtttgctggcccatctccagtttcaacagcagcgatctatgtcac

SEQ ID NO: 7463 - DNA, 416 bp, Triticum aestivum
  Clone ID: LIB104-024-Q1-E1-H10
gggcacaactcaacacgcccaggtcgttcaacattttctttcgcttttggtgtgtcgcatttagagtcgttctttcccattttaccgtgtttgcatggtaagatgtttggttggatttgaaggttcatagccttggctccaaagcttcaagctcttatagaaattagaactgagggccttttaaaatgagtcctgcataatagtgttgttcagtgggatgcagattgtttggtaatctgatcggctatccttggtgctgatttacgtactgatttcatcatcatatgactacaataaagaagttatgtgtataaatattacgaactgctgatactttgcatcagtgatttcaattcaaaaaaaaaaaaaaaaaaaaaacaaaaagaaaaaaaaaaacaacaaaaccaaagaaaaag

SEQ ID NO: 7464 - DNA, 452 bp, Triticum aestivum
  Clone ID: LIB104-024-Q1-E1-H11
ttcgcggggtcacgggaagaaaacaatgagagatccaatcttggaggggctctcgcccctctgggcaccatggataccgagtaccagggggagaacctctccacatctaggggcatggaggagcaagccagagggggtccctctcttccctctctctcgatggcgtcagaatgccaccgggggaaccatctccgcagtaatcgtctttatcaacatcaccgtcttcatcacctccctaatctctttttagcggtccactctcccgcaacccgctgtaatcccctacttgaatatggtgctttatgctatatattattacccaattatgtgtagccatcctatgatgtttgagtagattatttttgtcctatgggttgatttatgaacttgattggtttgagttgcatgttttactttggtgttatcctatggtgccttctgtgacgcgcgca

SEQ ID NO: 7465 - DNA, 401 bp, Triticum aestivum
  Clone ID: LIB104-024-Q1-E1-H12
cgaaaaaaatataaacgaagtcaaaaaaacaacaaaaatgtcaaaaaaaaaaaaaaaaaatggccgtcgttattaaaacatcttgaaaaaaaaaaaaaaaaaaaaaaaaaaaaggggcggcccaaaaggttcaaaccttacttacccttgaatgcaaattcaaagcccttcaaaagggcccccaaatttcaattcacgggccgtcttttaaaaacttcgtaacgggaaaaacccggggtttcccaaattaaacccccttgaagaaaatccccctttcccaacttggcttaataccaaaaaggcccccaccgtttccccttccaaaaatttgcccaccctaaatggcaaatggaaccccccctgtaccggcccataaaccccggcggttttggtggtaaccc

SEQ ID NO: 7466 - DNA, 441 bp, Triticum aestivum
  Clone ID: LIB104-024-Q1-E1-H5
cgggcttattagaagagcaagtgcaggggagggtctgggcaatgccttcttatcccatatacgtgctgttgatggaatctttcatgtcttgagagcatttgaagacacggaaatcacccatattgatgatacagttgatcctgttcgtgatttggaaactattactcaagaactgaggctcaaggatatagagtttgtgcaggctaaaattgatgaccttgagaaggcaatgaagaggagcaatgacaagcaacttaagatagaccatgaattatgtcagaggatcatgacacatcttcaagacgggaaagacttacgtttacgagaatggaaagctgctgaaattgagatcttgaatacctttcagctgcttactgctaagccagttgtttatttggtgaacatgagtgaaaaggactacctgagaaaaaagaacaagtt

SEQ ID NO: 7467 - DNA, 441 bp, Triticum aestivum
  Clone ID: LIB104-024-Q1-E1-H9
ttcgcggggtcacgggagcatcttatgggatggaagcggttgcggagggcaaggcccagtaaccctgaaagaagaaagacggccctgcccctgatgtttggaaggaaaggggcgtgtgttagctgatgtaatgttacaccgtagaatcatcgttcgtgacgataataatgatccgaccagaactcctctagtatcattgttctgttgtcattgtgtagtttactctgtatctgaactttgttttactcagcgaaaccgtactgctatgatgaatgtgtcgatgtaaatcgtggctgtcgtgcctgtctgactgatacattgttcatgtagtcgatgaatgatagcacctgtgtcgtctcagtttcaaaaaaaataagaaactaaaacaataaagaaaagaaaaaaaaaaaaaaaaaactcaaaaacaattacataacactt

SEQ ID NO: 7468 - DNA, 130 bp, Triticum aestivum
  Clone ID: LIB104-025-Q1-E1-A1
tacggtcctacattccgggtccacggggggccgaaatgctaggcgagctctgaacgtgccaggcgatcctgttgcagtttactccggactcgcttgaaggtgtccggggtctgtatcgccgaattagtgg

SEQ ID NO: 7469 - DNA, 365 bp, Triticum aestivum
  Clone ID: LIB104-025-Q1-E1-A11
ccgggtccacggggcacggttatggcgtcgtggcggcggccgtcgtctctgctgtcttctcatccatcttctgatttttggacaagcacacgctcttttatcctctccctttcttctatccttcatgtttgtttacataactctgcaagttcccacacaacgacacgatgctttagatgatctatatctactcacgtggtaagaggattcgttcggatgacttactcttgttttaccccatacaagtagatggaaagttgagacttgtgtttcttcatgtggaagtgatggtttgtagtaatatcctgaaaaaatgtggttatgttcttcttgttctaattgaaatctggtacgcaaacgccatg

SEQ ID NO: 7470 - DNA, 405 bp, Triticum aestivum
  Clone ID: LIB104-025-Q1-E1-A2
ggtccgacattcacgggtccacggcgaagcggtcattcgatgctgagacgccgcggcggcgggagtcggcacgcagcaacgaggcggtcgaggaggcgcggatcaagctgctggagctgcggcaggtgaacaacgtgaaggcgctcgtcggcgccttcgagaccgtcatggacgacagccaaagcatcgccaccgcacgcaagccgctgctcaacctccatgcctgaactacgagtacattccaccagcatgaaactcgatcgcgtgcgcctcctcctttagcccggctactctttaatcacccatcaacccaatttgtcgtcgtcgcacacttatctataattacggtatcgcttatactttgcaacgaggaagatgatggacgggttatcatgatgtaataat

SEQ ID NO: 7471 - DNA, 103 bp, Triticum aestivum
  Clone ID: LIB104-025-Q1-E1-A3
tctgtaaactgaagccaacccagcggtcaatctgaactctgtccacacaggagatcgttcacctggatgcggtgctcaccacgataccaccagctgaacatcc

SEQ ID NO: 7472 - DNA, 465 bp, Triticum aestivum
  Clone ID: LIB104-025-Q1-E1-A4
cggtcctacttcacgggtccacgggcaacgaataaagcattatatctcaggtacgcctattaatgttgaaagcaatattatccaaacttttacaccgaaagaacacataaaagagtccttccggaacactccagaatcgtcaaaataaggaggtacgtgatacggtaagtaaacggactccaaaaaatctgcaaaaatattttttatcgatcttggtatattttaaaattttggaaataaagaaactcccaggaagcgtcacctgatgggcataatacaccagggtacgccaggctttcctggcgcgcccaggtgagttgtgcccacctgggacacctcctgtatttcatttttcttccatgtacttgccctgcaagattaaaaatctacataaacttaccaaacatgttaaccaccatatcacggagaaatcctctgttctcttttcttgctattttctgacag

SEQ ID NO: 7473 - DNA, 378 bp, Triticum aestivum
  Clone ID: LIB104-025-Q1-E1-A5
acgggcaagtcccaccttcttcccacaggcggatcagggagcctctgcagattgaccttcgtttggattcggattcaggtttgatccaacccaaatccaaatcgtctgatttggcaaggatttgatcaacaactggggatcctgagttgaatatgatatcaaatccggtgaattggtacagtttcgggcctggatagaagctgtagtgatgccagattggaaggcgggcgagtttgaaggtaaattcaacgatgaatttgctcggggtaatagcaacttgcaagaagatggagcaaggcctttgaatatctcaaataagaaactgaaacatgggattaacactgaagagaacccgcaaggtgtcgtgtctacaacaac

SEQ ID NO: 7474 - DNA, 374 bp, Triticum aestivum
  Clone ID: LIB104-025-Q1-E1-A6
gccaacgaggaaagcataacatctcatgtacgcatattaatgatcaccacaacagtaactaaacttttaaaccgaagtcacatttatcagattccttccggaacactccagaggcgtcaggataatgaggtacgtgtgaccggttttacattcgggccagaaaatctgtctttaaaccttttaccgatcttggcaaatttgaaatctttggaatatgattcaactctcagaccacctttccctgtatgagcataatagaggagcgcaagccatgctgtctagtcgcgtcaaagtaacttctggtcatcagcgatatgccctgaatggcaatgttcttgcagctgtatgcactgaaacattgccccacttgactc

SEQ ID NO: 7475 - DNA, 448 bp, Triticum aestivum
  unsure at all n locations
  Clone ID: LIB104-025-Q1-E1-A7
cggggtcacggggcgaggataaggaagggtggtcggccgaggcgaatgaagacgaggcggcgtcgtccaacgagaaggacatcgaggagatcaacgtggaggatgacggtagtgtcgccatcgcggatgcctccgtgggcgtagtcaccaaggaggatgacagtatcatctcggccgatgctccggcgatagagaaggaccagatcgacacgttcgtgcctgctccggcagccaaggccaacgatgatgccggtgccaccttcctggctgccccggtggccggtgatgatggcagtgcctccttcgttgctgcgccggcggccaaggaggacgaacttgtatccatctcgtctgctccgttggcggaggagattganggtatcatcatggcggctgctccggtcgctgacgatgttgatgttgcaccttcccggacgctccggtggcc

SEQ ID NO: 7476 - DNA, 398 bp, Triticum aestivum
  Clone ID: LIB104-025-Q1-E1-A8
ggtccacggtacgacgggtgatctgttcaggagcccgtctgttgttgctgttgacctcaggcaagaaatggtggagtacattacacaatgaagtgaaacgttcatagctgatactctcattgaatcggacgtggaacaaaacgctgacaatcaaatgccagatgacccttatgaggtcatatcaatcttcatggatgaattcagtcgcacgagaaggaacatcattggccatgtctctgggtggttgttgagcgacagccgcgaagataagatcgatgattttgtccaggaaatggatatgacccgcttctggacactagaaaggagagaagggatcgccgaggtcctcctcaagaatgtggacattaatactaagttccactgccctgagaaatatg

SEQ ID NO: 7477 - DNA, 412 bp, Triticum aestivum
  Clone ID: LIB104-025-Q1-E1-A9
cacgggctaaaggataaccagatcaagtctgtatcgtgtgtgtcccccggcgtgagcccgtggttgcgttcgtggagtgaacgatctgcatgcgcatagccgttgcgaactgttggagtcacgtgcgatgtgcgcgcggctggagggagttagctgcatgctacctatatggttggacgggtcatgctagtgcatgcaaggcgcagcccggcgggtcacgtggtcatgcatggatatggatcgtgcatctaatggttagcttaatgcgtgagttatttgccgagtgtgcacgtcgtgtggtgtgtgtgcaccggtataagaaaccctccgtctatgtactgctcgagctgaaccggtgtgtaaccatgtaaccactgttaggaagaaaaggattggggcgttcatgctcccg

SEQ ID NO: 7478 - DNA, 390 bp, Triticum aestivum
  unsure at all n locations
  Clone ID: LIB104-025-Q1-E1-B1
ggtccacgggccctctgcatggagtagacaaagagaacacagacatattaatgtactgcacgggtggcataagatgcgacgtctactcaacgatcttganggagaaaggtttcgggaaactgtacactctgaaagggggcgtgtccaacttactcaagaccaaaggagcgctgagtgggtgggtaacctgtttgtgttcgacgaccggctctccctgccaccggccaagtttgcangggcagaagtcgcagcagaagaagggggtgccgacaacggggatctgtcatcgtctcggtggctggggcggtgctacttgtgcgggtccgangtggaggagctgangcaacgcaactgcgccagcatcgactgcaaccgcctctacctgtgctg

SEQ ID NO: 7479 - DNA, 369 bp, Triticum aestivum
  Clone ID: LIB104-025-Q1-E1-B11
ggtccacggggaagaggcccttcaaggtacctgagatggctctgagggtgtgcgtgatccccctcgccttggcctccctgtgggagatggccaccaacaagcaagccgatgacacctacggggagatcagcttctccaacctctccggcttcaagtatttagttttcattaacgctgtcactgccgcctattccgtggtctccatcctgatgtcatccttcaagtccctcgctcgcttcgattggctcattttcctcctggatcaggcggcggcgtacctgctggtgacatcgtgctcggcggcggcggagctggtgtacctggccaaggaaggccaaccggaagtttccttgggccaagttttccccc

SEQ ID NO: 7480 - DNA, 448 bp, Triticum aestivum
  Clone ID: LIB104-025-Q1-E1-B12
attcccgggtccacggggaggttgagaagctgattggcaggatagtgaagtggctgaagcccggtgggcatattttcatcagggagtcctgcttccaccagtctggggattccaagaggaaagtgaacccgacgcactaccgggagccaaggttttacaccaaggtgtttaaggaatgccactcctatgaccaagatgggaattcctttgagctttctctggtaacttccaagtgcattggagcttatgtgaagagcaagaagaaccagaaccagatatgttggctatgggagaaggtcaagtgcacagaagacaaaggctttcagagattcctggacaatgtgcagtacaaatccactggaatcctgcgttatgagcgcgtgtttggggaaggttatgtcagcaccggtggattcgagaccacaaaagaatttgtggacaagctgga

SEQ ID NO: 7481 - DNA, 278 bp, Triticum aestivum
  Clone ID: LIB104-025-Q1-E1-B2
ggtcctacattcacgggtccacggcgctgttcaacgcgaccaagtgatctggccgccgagcagcgacgccatgcgacgcgatgatccgggagcagagcggcttcggttaagaaataaataaagaggatcggtgctccaccgtgctgcggccgtgtggtgttgggtgtgattgtttgcttgttgcagtggctgcattcactggctgggcaccaagattcgttagataagataaatgtgcacgtacgtgctgtattcctgaacttgtactgtgacgagcg

SEQ ID NO: 7482 - DNA, 305 bp, Triticum aestivum
  Clone ID: LIB104-025-Q1-E1-B3
ggggtactttgattcgataactaatatatttttgcaataagtatgtgagttctttatgactaatgttgagtccatggattatacgcactctcacccttccaccattgctagcctctcttgtgccgcgcaactttcgccggtaccatacacccaccattaccttcctcaacacagccaccatacctacctattatggcatttccatagccattctgagatatatttccatgcaactttccaccgttctgtttattatgacacgcttcatcattgtcatattgctttgcatgatcatgtagttgaca

SEQ ID NO: 7483 - DNA, 477 bp, Triticum aestivum
  unsure at all n locations
  Clone ID: LIB104-025-Q1-E1-B6
gtacagtccaaaattcncgggtccacgggaggagggcacgcggtgctcctgctgccggtgctgctgatctcggcgctgttcgcgcagatccgcgcgtcggatccgttgttccacgagtccttcaacgagagcttcgacgggagctggatcgtgtccggcaaggaggagtacaaaggtgtatggaagcacgcgaagagtgatggccatgaagactatggtctccttgttagcgagccagccaggaaatatgccataatcaaagaacttgattacccagttactatgaaggatgagacagttgtcctgcagtttgaagtgaggcttcagaatggccttgagtgtggaggtgcttatatcaagtacatccgtcctcaggctaccggatggaacgccaaggactttgacaatgatactccatacacaattatgtttggtcccgacaagtgtggttcaacgaacaacgttcacttcatcctg

SEQ ID NO: 7484 - DNA, 458 bp, Triticum aestivum
  Clone ID: LIB104-025-Q1-E1-B9
gggtccacgggcaaaggttggcatagagcggccaatgcgcagacaagatgaggaaagggcgcggtcaggactcacggacacggagctccagcggtccggccatggcagccgaactgcgggggcgacggctaaacgacgatggaacgggcagggtaagggggaattgatacgtctccaacgtatctataattttttattgttccatgctatattatattctgttttggatgtttaatgggctttattatacacttttatattatttttgggactaacctattaaccggaggcccagcccaaattgctgttttttgcctatttcagtgtttcgcggaaaaagaatatcaaacggagtccaaacggaatgaaacctttgggaacatgattttcggaacaaacgtgatccagaggacttggagtctacgtcaaaaatcaacgaggaaagcacgagcaagggg

SEQ ID NO: 7485 - DNA, 366 bp, Triticum aestivum
  unsure at all n locations
  Clone ID: LIB104-025-Q1-E1-C1
ttcacgggtccacgggggtgcggatcttggtgtggttgtgatgcatgcaggggctcgcgtgaggctggactagctggacatggctacggccatggttgccggctggttcagagaagatgagcgtgggcgtgtgcgcaagcgaggagcagagaaaacaagggagcctccggcgcatgcgagcgggacggcgaaggagctcgttggaggaaactccggcgaccaaaagctacggctgaggtgcgcaaatgaaccgcaacggggacccgaactcgcgcatgtctcgcacagcaccaagtgacgatggangcgtcgccggtgttgaggaaacagaggcggtgaggccatacttgaactcgaagaaacaca

SEQ ID NO: 7486 - DNA, 445 bp, Triticum aestivum
  Clone ID: LIB104-025-Q1-E1-C12
gggtccacgggggaaccgctacatcgcgccgccgaacctggcggcgaagctgatcacgaagcggctgtacgcggaggaggccgagtggaagaactgggtgtggcactcggagggggacctgatgctcaacgacgccgtcttcaccgacagcggcggccccaaccaaaggaagttcgagaaggatgacctcatcccgcccaagccgggatcgtacgtcaccaggctcacgcgcttcgccggctgcttgccgtgcaagcccggcaagccctgctaaaccttggtggccccgccggccggccggagccgatcccttccgaatcttcaattctctatatagctttgttcaattcttttactcaaagattcgtgtatgtattactaggacatttgagtagtctacggggttcagatcagaggaccctgtaggttgttcttgtacatgcat

SEQ ID NO: 7487 - DNA, 313 bp, Triticum aestivum
  Clone ID: LIB104-025-Q1-E1-C4
ggggccacgggaggacatgaaagaatttcgacgaaagataatttgattaagcgcaactggacatgatctactaggtgtagtttctgtgatcgggatgaaactatcaagcatcttttctttgattgcccgatggcgaaggtgttgtggcgctcggtgcaaattgcctttaacattactccttcaaatttggtcaggtcgttttttggaacgtggctggttggtatagaggctgaaacagctagacaaatttgagtgggagcatgttttattccgggctactgcgctaatccgtacgtggtcattactcactccg

SEQ ID NO: 7488 - DNA, 448 bp, Triticum aestivum
  Clone ID: LIB104-025-Q1-E1-C6
ggtccacggggaaccacatacggatgtatgtggatgcattttagaatgtagattcatccattttgttccgtatgtagtccatagtggaatctctacaaagacttatatttaggaatggagggagtatattccaatgatgggcttcctcaaattgccctaggtctttgtgatgcacacccacttagtttctttttgagctttcatacacttatagctctagtgcatccgttgcatggcaatccctactcactcacattgatatctgttgatgggcatctccatagaccattgatacacctagttgatgtgagagtcgttaatagcatggtaatttgggccttctttcttgatctctcatgcttcacttagattattttgagattcgttaatagcatggtaattttcttaatgttaatatacttagtgttcaagatatgtgaaactttct

SEQ ID NO: 7489 - DNA, 453 bp, Triticum aestivum
  Clone ID: LIB104-025-Q1-E1-C7
ggtccacggggcctgacggagcactccctgaagaagaagaactcgacatggctattctactggcgtttctgctgctgatttcttatggaaccggcaacatccatggctcaacaacggttaaccatgggaacaacacagacatgctctccttgctcgtcttcaaagcggctaccaacgacccaacaggcgtcctgcgatcatggaacagaagcgtccgccactgcgactggacgggtgtcatttgcagctcaccgaatttcaggcgcgtcgttgccctgagaatccccggccaaagcttgtcaggggaagccaccaagcttccgacaactcgattttcgagaacatgaactaagggggaacattcctgaagtttttggccagctttcacaactctcaaggcttgaccttggctataataatttccaaggtgtcatacctccatagattagtgag

SEQ ID NO: 7490 - DNA, 246 bp, Triticum aestivum
  Clone ID: LIB104-025-Q1-E1-C8
tccacgggtggactggaacgcttctgcgcaccagctacttcagcctgatcaagccgatggtggattcctgtccgtgactggtagtcatcaagcgatacgtttgcattgacggtggccacttcagcctgaccaaagacataacttttgaatgacttcacctttgtcatgtttgtaaattaaatacgaagttgcttgcactatgtagcgcttctgtgaattagaatagtaccgtctgtacggttgttt

SEQ ID NO: 7491 - DNA, 304 bp, Triticum aestivum
  Clone ID: LIB104-025-Q1-E1-D2
cgggtccacgggaaatgacaattcaaagatgatggctggacttccttttcgcaatagaggatcgtgatatggtggttgagcctatgtcagccactggttccactcagccgagaaggccaagcataaggtcttcaccttcagcatccagtaagagtgttacggcttgcaatttagttccagatcagctgccctgccaacactagcaacaaaagcaaacagggctgcaaacccttaacggttcgatgcacggactaaacatttctccgtaaatgcctgtgtactggtttttgctggactctgggga

SEQ ID NO: 7492 - DNA, 286 bp, Triticum aestivum
  unsure at all n locations
  Clone ID: LIB104-025-Q1-E1-D3
cgggactgactgagagaacatgacaaataaggagttgcatgataaatttcagcaaatgatgagtgaacatgtgcaagatgtgctaaacagatttgaagaggccatggagaagatagatggcatggagaagaagttcgaaacaaagctcaataacaagttttaatgaattgctcgcgcgtcttccaccaccaccaccggctggccctaacgcanctctacaacaacaaacaacaacatcaacaaacaacgtcgtttttccaaatcaagtgggaacaagcacaacgtg

SEQ ID NO: 7493 - DNA, 83 bp, Triticum aestivum
  Clone ID: LIB104-025-Q1-E1-D4
cgggtcacgggactgtcatgatgaggcgagagccggtcgctgttcgagaggtttttgcgagtccttaaagacttattccacat

SEQ ID NO: 7494 - DNA, 439 bp, Triticum aestivum
  Clone ID: LIB104-025-Q1-E1-D7
cgggtccacgggcaggtttaagtgttctaatatagcttttgttaacacagttgaaactttagcatgttccttaatcctaacacggaaaggtgtggtttctcaatataagcagaaggaacaactggatcaacattataaagtatagtttcctctttaagtagaactagttctttaatttcttctttaatgggtgggtgatatttaaaccacttctccttatggagttcaatatgggtagcaaatgattcacaaaaggaggctactatctcagagtcaagtccatatttagtgctaaacttttgaaaagcatcagtatcaataagagatttaacacaatcatacttaagtttaatacctgactctttaccttcgtcgagttcccaatcttcagagttgcgtttaattctttccaaaagattccaccggaattcaatagtct

SEQ ID NO: 7495 - DNA, 442 bp, Triticum aestivum
  Clone ID: LIB104-025-Q1-E1-E10
gggtccacggggaagttgaaaagctgattggcaggatagtgaagtggctgaagcccggtgggcatattttcatcagggagtcctgcttccaccagtctggggattccaagaggaaagtgaacccgacgcactaccgggagccaaggttttacaccaaggtgtttaaggaatgccactcctatgaccaagatgggaattcctttgagctttctctggtaacttccaagtgcattggagcttatgtgaagagcaagaagaaccagaaccagatatgttggctatgggagaaggtcaagtgcacagaagacaaaggctttcagagattcctggacaatgtgcagtacaaatccactggaatcctgcgttatgagcgcgtgtttggggagggttatgtcagcaacggtggattcgagaccacaaaagaatttgtggacaagctgga

SEQ ID NO: 7496 - DNA, 447 bp, Triticum aestivum
  Clone ID: LIB104-025-Q1-E1-E11
ttcccgggtccacggggagggatggatacgccatcgatgggagtacgatggggtggtgaggcctgcacagctgcacagccggccgccgaggatagagcaggcagtcgcgccggcgcttgtttaagcggctggagcatgaagagcacatattgaataagcacgactgtcattggatggacatccaacagtcactgcttgtgtgtcaacatttttttacgacaacctcaagtctgtggtaaacagcatacattccatctgccattatttctaataatttacatcccatttgctaattcgtatgggttttttggagcccagattctttttgttagcattacaacccatattgtggcacacgttaaaccactatacgaaattttgcataattcagtgctgtccaaactatttttaatcccacaatttcgagtcagattcagactgatttta

SEQ ID NO: 7497 - DNA, 413 bp, Triticum aestivum
  Clone ID: LIB104-025-Q1-E1-E2
ggtcgacattcacgggtcacgggtctgatcaattgaatcatgcactttgatgtgacagttttagtcaatagaagcttaattatagaaaattgtggaaacaaagcccatgttctcatctgtaagtggctagttcacaataatgtcatattcctaggaaaattataaatcactatggggttaagcggttaggcacaaatttctaaaaatgtattattttcaataaacgaacataccaatccacaaatagtggacgcaccaacagaagatttgatgccagcacagtaactcatgagtgaacctgttataacaatttcgacaatacaaagattcggctatcaaatgaatactacaaaaattacaaatattattcgttatccaaaagggaaaagtaaaagatgaagaaacacctacct

SEQ ID NO: 7498 - DNA, 374 bp, Triticum aestivum
  unsure at all n locations
  Clone ID: LIB104-025-Q1-E1-E3
cggcaggatctttacctgatctctcggacaaaaacagcttaactttgaattatggtggccttttttcatgtaattctttgaccgcagcagcagcttaaccttagagcagaacacattactggctacttattatgagttttgtgaaatttgcatcatgtttgtatatggtagaagtgtggcagtggatgatgaattgaattgactaagttagagtgaagtgtttggttgaagattgcggtattgcatttgccagaancaaantaactcatgaatgaacctgttataacaatttcaacaatacaaacattccgctagcacttttctcgagcaaaaatacaaaatattactcgttaaccaacaggggaaaagtcaaa

SEQ ID NO: 7499 - DNA, 412 bp, Triticum aestivum
  Clone ID: LIB104-025-Q1-E1-E4
cgggcccaaagcacccaagataatatttcaataagtctcaagcatctaagcttggggatgcccggttggcatcccacctttcgtcttcaacaactatcggttagtatcggccgatcctaagtttttgcttattcacatgatgtttaccattcttagaatgtcattttcttttgctttgattgatgtttgaataatataccaagatatgaaattattaaatgttagagagtcttcacatagctaaataattatttaactactcattgatcttcacttatatctttcggagtagtttgtcattgctctagtgcttcacttatatctttttagagcacggtggtggttttattttgtagaaatagatgaactctcatgggtcacttatatcaatttgagagtatttagaacagca

SEQ ID NO: 7500 - DNA, 427 bp, Triticum aestivum
  Clone ID: LIB104-025-Q1-E1-E6
gggtccacggggtaagcgcaagatagaagacctgcacgaactcataccgtctacgcaatcttctggaaataaaacgagaacgaaacgtcggcgcaacggacaacggacttcgactcggagacagcaatcacgctgtagtttcaagacgaacttctttcttaaaatcgagcaggagcaatcgccgaaccacgcccgctgcctcagtccgaccacggcccgctcctcgatttcgcaaggtgaacatgcgcacgatgggtttgggattgggagcgccgttcttcctcctcgtcctcctcttgctggccgctggcactggagctgtgccgcaggacaagatggttcgcatgaattatgttcttctcgatctcaatacaatcgagatccgcccaaatgacaaggaggaaattgcctctagcaaaattcctgt

SEQ ID NO: 7501 - DNA, 267 bp, Triticum aestivum
  Clone ID: LIB104-025-Q1-E1-E7
aaatccatgctgccaactctcaaggtcctcctcatccccgggattctcaatccaaccccgttccgtaacccctcccgaaggtcaactgaaccttgtaagtagatatccggaaccaacccaaatccttttcctttttttcggaaaaaccaacaagagcaatctccgaaacaagcccgatgagccaatctcgaacaaagagcacacaaaaaggggccgctcaagaatactaactcttaatgactcgtaaatggaatgtcatacctcttc

SEQ ID NO: 7502 - DNA, 262 bp, Triticum aestivum
  unsure at all n locations
  Clone ID: LIB104-025-Q1-E1-E8
attcncgggtccacggggcatccatacaaaatggaccaactacagaaagcaaccctggcctcttccggagtacccggacaattgctaaaccataataacaacactggaagaattcaacaacaggctccaggccaaccagagcaacacggtgctgtgaattaagaggcgagcaagaaggacctgaagagccggggcttgtgcctcgtcccaatctcgtgcacgtcccactttggcggggacaacgctgctgactactgggccc

SEQ ID NO: 7503 - DNA, 448 bp, Triticum aestivum
  Clone ID: LIB104-025-Q1-E1-E9
tccaaaattcccgggtccacggggcgtcccgacccctcactcataaacatacacgtaacccagaagaccgttctgtcacgtatacacaacgtatcggcatctgtctatgtcccactcaagcatgataatttgcacaatcagaactcaatgtctggatcacaggcacaggatcgcgagattggcgctccggcagaagacaaatacggacagagatacacgtcacctctcaatgaagcagacaaatagagtaataagtgaactaacgcgcaactaaaacgtctagctcgagtctcttacaggttggagctaaattcatctatatggaaatattgtagcttcgagaactttcgtaggagtctcggtagcataaatactatgaaagtacaaatggtagaataatgttccaggattggtttagatacatcgagatgttaagtggatcgatttc

SEQ ID NO: 7504 - DNA, 312 bp, Triticum aestivum
  Clone ID: LIB104-025-Q1-E1-F1
cggggccacgggtacttgcatagtacttacaacatgtaggttgaattctactgaacatccattgagtaactgagtggtgtgaatgcatgtctcatacaacccttgagaaatatgacataatgcaatgtatctcaagttaaaattcccaagtcatgtgatatatcaagatgaaaaatggtatggggccttactaatgccaacctaaaatgcatacaagtctcaagtcaatctattgatcctaagctagaacatttcatatataagataaaagatcaagtgccaatgtttcccttcgcatgttacaaaatgtta

SEQ ID NO: 7505 - DNA, 372 bp, Triticum aestivum
  Clone ID: LIB104-025-Q1-E1-F10
gtaatggtatgcctgcaccacgacctcaggtacgagatcatgtccagattcctaaagtgatattgaatactccaccatttgagggtagatatgttcctgataggtatcttacttgggagttagatactgaacaacgatttacatgtttacaatatcctgaggagagacgagttgctgctgctgtttgtgctttcactagttttgcatgtgtatggtggtctgaacattgcagattatatcctattcgacctatctgggctgcttttgaaagttctatgcgtacccattcggttcaacatattttcaacgtgcattgcttcaaaatttgcagcgtttaagtacaagggaaaacttccggtcatcaatattatc

SEQ ID NO: 7506 - DNA, 256 bp, Triticum aestivum
  unsure at all n locations
  Clone ID: LIB104-025-Q1-E1-F4
gtccgacattatcgggtccacggcgaggttgaaaagctgattggcaggatagtgaagtggctgaagcccggtgggcatattttcatcanggaatcgtgcttccaacagtctggggattccaagangaaagtgaacccgacgcactaccgggagccgaggttctacaccaaggtgtttaaggaatgccactcctaatgacaanangggaattcctttgagctttctctggtaacttcaaagtgcattggagcttatg

SEQ ID NO: 7507 - DNA, 351 bp, Triticum aestivum
  unsure at all n locations
  Clone ID: LIB104-025-Q1-E1-F5
ggtccacgggtagtaccgcatagacagtagcccctgatgctcggttcggtgttcggaaataaaagccggactgaggatcttaaaagatatacgcaggagtcataaaaatatgtcaatatgggattgcaggctgcactgctgacctctgccgcactgactgcggaggtcaatactttgaagcaaaatctcgagcggtccaagaacgagctcggccgtgccaagaagcagctcgaggacaaggaaggtgagtaacaccttattaaaattgtaccttacataaaaggattttggttgaagaatgacaaggataacgtgggaattgcangggccactaacgaggtggtgaccctg

SEQ ID NO: 7508 - DNA, 409 bp, Triticum aestivum
  Clone ID: LIB104-025-Q1-E1-F6
ggtccaccagctcatggtaattaattatgctagcgagaatgtcatcctcgcttgccagggacttcagcaccgccagctcatcgcgatcaccgacgcggctagtgcgcttgtgaaagcccttgcgtgctggtgagaactcctttgacggctccgcagcccatcaagacatctctattgtggatgtcgcgtaacggcgagacctctctagttcttttgcgaccttggtcattgctccttgggtatatgtcatccaaaactcctcctatcggtcatggcggaatgacttgacaagtaagaactattttgttagtgattaagatacgaaacgttgagttaatttctagtgggtaattttaaaacccggtgctaagtgttaacatgtttaagtttgattcgtgtgaacaaattt

SEQ ID NO: 7509 - DNA, 316 bp, Triticum aestivum
  unsure at all n locations
  Clone ID: LIB104-025-Q1-E1-G1
ggggccgctgcaattcaaggtggtggtgaccggcgggtacgacgggaagtgggtgtgggccgaccgggaggtgctgcccagccggtggcgcgccggcgatgtctacgacacggnggtccagatcaccgacgtcgcgcangagggctgctttccatgcgacacgcangagtggaggtgaaagcaggcaggctagtaaacaaacaaagagccaaagaagaagctgatggctcctcgttttggccgggctatgcatcacagcacaaggccacaccacaccagagatgattagtttagtctaacagttaacaccagatga

SEQ ID NO: 7510 - DNA, 452 bp, Triticum aestivum
  Clone ID: LIB104-025-Q1-E1-G11
gggtccacatgggcaacatgctgatgatggacaggttccgtcaatggcaggccacgcacaaccggtcgtacctgagcgcggaggagaggctgcgtcgcttccgggtgtaccgcgacaacgtggagtacatcgacgccaccaaccggcgcggcgacctcacctacgagctcggcgagaatgagttcgccgacctcacccaggaggagttcctagccaggtacgcgtcgtcctacgatggggtcggtgatgatactggcatcacgttgcctgtgggcggtggcgacgccgagctgtggtcgtccggcggcgacaatgatagctccttggaggctccgcctcccagctgggactggagatccaagggcgccgtcacaccggtcaagtcccaatgcgcaggatgcgctagctgctgggcgttcgtgacggttgcgacgatcgagactctgaactgg

SEQ ID NO: 7511 - DNA, 86 bp, Triticum aestivum
  Clone ID: LIB104-025-Q1-E1-G2
cggggttccaacaatgatgagctgggaactgtgctgaactgaagatggttgaagatattcacggtttgcctgagtttgctccatat

SEQ ID NO: 7512 - DNA, 220 bp, Triticum aestivum
  Clone ID: LIB104-025-Q1-E1-G3
ctggttcttatcctgtgttgatgcatggtctgttgatacacgcgcatttgccagattatgcgccattggtgtatctacgtgtcattatggtactcattgctttgtgtcatattgtgttcgtccggtattagctctcttacagaacgtttcgattgaatgccttgcctgttggttcgtaaccgaccatcattacttcgtatgatcttcgctattactggct

SEQ ID NO: 7513 - DNA, 416 bp, Triticum aestivum
  Clone ID: LIB104-025-Q1-E1-G5
cggggggaatgtatggttgggttttatttgtgtatttggcggaatttggcatattttaaccaaacccttcgcatgggctcgccgtgcatttgtatggtctggagaagcttacttgtcttatagtttagctgctttatctgtctttggttttatcgcttgttgttttgtatggttcaataatacagcttatccgagtgagttttatggacccaccgggccagaagcttctcatgctcaagcatttacttttctagttagagatcatcgtcttggagctaatgtgggatccgctcaaggacccacacgtttaagtaaatatctaatgcgttccccaactggggaggttatcttttgagggggaaactatgcgtgtttgggaccttcgtgctccatggttacaagctctaaggggcccc

SEQ ID NO: 7514 - DNA, 426 bp, Triticum aestivum
  Clone ID: LIB104-025-Q1-E1-G6
cgggttacgtcaatctattactaacacttattaccaagttgcacttgcttttcaaaagaaattgaaactataacgcctgagactatccaatagaagaaagagccacaagcaagccatagcagcatcctttttcttcgctttcttcaacaatttatctacctcactcctcatcataactcaaatgctcgtcttgactctatcatatcttccttgcatatgcatcacatcataatttcaagctttatcagatggagtgaagagtacacttttagtggtcctcttagtgagttggtttatgtcaaacaacctcccggttttgaaaaaccccgatcacatttaacaactccatgaagcgctctatggactcaaacaagcatctggtgcttggtatgatcaccttaagacgtatctaaacgagaagggggt

SEQ ID NO: 7515 - DNA, 360 bp, Triticum aestivum
  Clone ID: LIB104-025-Q1-E1-G7
attactaacacttattaccaagttgcacttgcgtttcaaaagaaattgaaactagaacgcctgagactatccaatagaagaaagagccacaagcaagccatagcagcatcctttttcctcgcgttcatcaacaatttatctacctcaatcctcagcataactcaaatgctcctcttgactctatcatatcttccttgcatatgcatcacatcataatttcaagctttatcagatggagtgaagagtacacttttagtgggcctcttagtgagttggtttatgtcacacaacctcccggttttgaaaaaccgcgatacatttaccaactccatgaggcgctccatgggcccaaacaagcat

SEQ ID NO: 7516 - DNA, 134 bp, Triticum aestivum
  Clone ID: LIB104-025-Q1-E1-H1
cttccatctcacagacacttggcttcgggcaatcgatgtgggagtggacattgtgttggttccttcgaaatttgggaaaataagcaatcaaatttaacctggcaactaaattccaatccaatttggaatcccaa

SEQ ID NO: 7517 - DNA, 419 bp, Triticum aestivum
  Clone ID: LIB104-025-Q1-E1-H10
gggtttgctagatgattattgttcccataagttgtttgctcacaaaatccctatgcataggaagtgggttagacttaaatgtgctagtcatattcttcatgatgctctctttatgtttcaattcttatcttttatgtgagtatcattgaaatcatcatgcctagctaggggcgtcaaacgatagcgcttgttgggaggcagcccaactttatttttgttccttgatttttgctcctgtttagtagtaaatattttacctagcctctgtttagatgtggttttatacttttaattagtgtctgtgccaagtagaacctttgggaagacttgggaaaagtctttgcgatcatgctgtaaaaaaatagaaactttagcgctctcgagaattgctgccattttttattggagagtgctattta

SEQ ID NO: 7518 - DNA, 324 bp, Triticum aestivum
  unsure at all n locations
  Clone ID: LIB104-025-Q1-E1-H2
ggaagatctaaaacaatatatcttctgtgcaaatataccccaacataactcattacattgtcttccttgtccanattcaactaaatttctcaagttttaaataaataaagggtaatcaaaatcatagaagatgtccaagataatataattgtatgtgaaaagttccctccctatactaatcattcaagaatttcttgtatgatcaatattgtcattgtcaagcttcaaaagatttcactttctaaacccaatgtgaagccaatactaagcatgatatgaacatataatttcaaattcatgatattcaattcattcaacaatttt

SEQ ID NO: 7519 - DNA, 333 bp, Triticum aestivum
  Clone ID: LIB104-025-Q1-E1-H4
agtcagtggatggagagctacgagcagtggatggagagctaagagaaaaaaaacatgtgaaaaatagagtgaagttcaagtagacatgccgagaagttcaagttcttcacgcggcgcattttcgaagaatttgttttgcgataaaggcagaacgaatgatctcgccatttttgaaattacttgaaaacgaccaggaatcagagaaaaccatcaacatgaaaaagtttcgcattttccgtagcttttcaacggtatattatttgccccattccgataaactttgcagaaaatacggcaaaaaatatgtttttaaccattttcagaactaacata

SEQ ID NO: 7520 - DNA, 451 bp, Triticum aestivum
  Clone ID: LIB104-025-Q1-E1-H5
cgggtgatctgtacaggagcccgtctgttgttgctgttgacctcaggcaagaaatggtggactacattacacaaagaagtgaaacgttcatagctgatactctcattgaatcggaggtggaacaaaacgctgacaatcaaatgccagatgacccttatgaggtcatatcaatcttcatggatgatttcagtcgcacgaaaaggaacatcattggccatgtctctgggtggttgttgagcgacagccgcgaagataagatcgatgattttgtccaggaaatggatatgacccgcttctggccactagaaaggagagaagggatcgccgaggtcctcctcaagaatgtggacattaaaactaagttccactgccctgagaaatatgaaaacgaggaacgtcttgctgatcacaaggcacagtgtagcttcaggcctgtcacttggccgaacga

SEQ ID NO: 7521 - DNA, 422 bp, Triticum aestivum
  Clone ID: LIB104-025-Q1-E1-H6
cgggtctcacttgagcggtagcacggccgttaacatcaacggcgagatcggtcctttcttccccaccctatgtggggttcaacaaggcgaccccttctccccgttcctattcaacatggtcgtggacgcccttgccaccatcctggataaggcgaaggctgctagccatattcgtggaatcacccccaccttgccggagggtccgggatttccctcctctagtatgccgacgacaccatcatcatggtcgaaggctcggaggcgaacatttccaacctcaagttcctcctcctctacttccaacaaatgtctggccttaagattaactttgacaagagtgatgttatggtgatgggcatgaggagtgtctagccattgccaaccggcttaactgccgcctgggctcctttcccatgacctac

SEQ ID NO: 7522 - DNA, 433 bp, Triticum aestivum
  Clone ID: LIB104-025-Q1-E1-H7
cgggtgcagaacaatgatgaatttataaatgttgtaaaatctcggttgacaaagctagagatggtgcggcatgtctttaacctaaatggcatcaaaggagcaattgctgcggtcgcaaagttgcctgatattgctgttcaagctgatgttgttagtactctcaagggaaaacttggtcttttcaacctagatattttctcaagccttctgcctgttcttgccgggttactgaacagcaaaactgaaaggcatgctattgttgctttggagatgttattggatcttataaagatttttggaccggttattcattcaacattgtcaagtagttcacctgttggagtagatcttcaagctgaacagaggttgcagcgttgcacccggtgttttaaccatttgcaaaagattgtgcaagctctacacccgttgatga

SEQ ID NO: 7523 - DNA, 325 bp, Triticum aestivum
  Clone ID: LIB104-025-Q1-E1-H8
ccgcatttatcatggtagtcaatacgcggatcgccaagctaaagatagaacgggatcgacatagtatcataggcagcagatgagtaatcgctgaggacccgaacttacatgatatcgcggtgcaatctgagattgctagtactcacagtgtaggattagccttgtcagcctacagagtttcgcatggcatccgcctattcttggggagacacatggaaccacagcttatgcagatagcactgttgcctaggctatggtatggcctcgtaaagcaactcctcgtacggctagtccatcagcaattttacgtggttcaactgttgga

SEQ ID NO: 7524 - DNA, 211 bp, Triticum aestivum
  Clone ID: LIB104-026-Q1-E1-A11
gggcgacagtataatcacaagaaatatatatataggataataaggtggtgtattgccgccatgtccgttaacctgaggttggttccaccaaaaaaaaccgttacccccgcccaaaattttccgacccaagggaaaataataacaacgggaaaaccacccaaaatcaaaccggcttgtgaaataaatggttgcgccccggttttttgtcgcc

SEQ ID NO: 7525 - DNA, 435 bp, Triticum aestivum
  Clone ID: LIB104-026-Q1-E1-A2
ggtcgtaattacgggtccacgggcatcacggccaagagaccgtggaacggagacggcgtcctgggtccacaaggctcctccggggggttggtttcccctaacggaaccccggctgggaaccccttcgcccggggcccgggtttttacaaattaaggtccccgtcggtcctggaagccctgcctttccgctggaaccgcgacatacaccgctgcttaaaggtgagcgacggccagctgcgctacgttcagatccatggtgcatctgagaagccggtggtcagcatctggacgctgtcatccagtgattcgtcaaaggcgacatggggaagcccgaccagcctccccttggatgtggttttgggaagacagcaactacagtgatgatccccggttcgtccgggggtcgtccctgctttgccgctggtccaccccatg

SEQ ID NO: 7526 - DNA, 111 bp, Triticum aestivum
  unsure at all n locations
  Clone ID: LIB104-026-Q1-E1-A3
tggaatcggttccgatggttttgtgacgagaacaatgttcttggtgcctcctgacatttaggggttgtggcagtgtcccggngagttgagctcccgaggtgttgtcgtcat

SEQ ID NO: 7527 - DNA, 462 bp, Triticum aestivum
  Clone ID: LIB104-026-Q1-E1-A5
cggggccacggatacagaagacgaacaggtgagtggagagaaaaggatgggagacgaaatatctgtacagcttatcatgttctctgtccccagttccctatctgaccaccccagcttgcaacagtagcaaattgatgcctgtcgtgtccagttgagcagatgagagatcaaatgagcatttcccgtggcctctataacaactagcaagtaaggattcatcgacttttacttctttttgtggatccaaaccatgatgtctttattgtatactaacatgatttttctgccgtagatgactccaccgtgcttgatgtaccggacacattgcttgatcacactcattgtatttaccttttccctaatgctttattatgtttttcttgagaccaagctaagtcatttaagctgatgttttgccagatcgtcttttggttaatcatctcatgcacatatcaacaaaaa

SEQ ID NO: 7528 - DNA, 424 bp, Triticum aestivum
  Clone ID: LIB104-026-Q1-E1-A6
ttcgcgggtccacgggcagattggcatgagccctgccgaggcggcggagtacaacaaatatatcattcgtgaggttagttccgggtcaggcacaccgctcatgccaaagcggaagttcgagacgtacatattcacgctcttcaacgaggacctcaagcccgggcccgtggccgagcgcaatttcgggatgttccagccagacttcacgccgatgtatgacattggcatcatgaaagatccggtcaaaacaacatcggcgccagcgtcggtcgtcccagcggtgccgcagaaagtgacagcaatgcctatggtcgctgctgctaatgccttggaagctggagtgcctacaaaggcgaacgactcgaacaacgcctaggcatccacgcaagcatcgtcgccaggcaacaaatccttgaccgatgac

SEQ ID NO: 7529 - DNA, 340 bp, Triticum aestivum
  Clone ID: LIB104-026-Q1-E1-A7
gggtccacggggagcacagaaaggacggcgagcacaaggagggcatgatggagaagatcaaggacaagatcagcggcgacggccacggcgacggcaagaaggacggcgaccacaaggagaagaaggacaagaagaagaagaaggacaagaagcacggcgagggccacaaggacgacgacgaccaccacaacaccatcatcgcatcccattagcattctaccattttcctcggagagaagtagccagaaacagcagcgccatggccggcatcatgcacaagatcgaggagaagctccacatgggtggcggcagcgacgagcacaagaaggacgatgagcac

SEQ ID NO: 7530 - DNA, 313 bp, Triticum aestivum
  Clone ID: LIB104-026-Q1-E1-A8
cggggagaacagaaaggactgtgagcacaaggagggcatgatggagaatatcaatgataagatcagcggcgacggccactgcgacggcaataaggacggcgaccataaggacatgaatgacaagacgattaagaaggacactaagcacggcgagggtcacaaggacgactatgaccaccacaccaccatcatctcatcccattatcattctaccattttcctcggcgtgaagtaaccataatcagcagcgccatggccggcatcatgcacatgatcgaggagaagctccacatgggtggcggcagcgacgatc

SEQ ID NO: 7531 - DNA, 370 bp, Triticum aestivum
  Clone ID: LIB104-026-Q1-E1-A9
gggtctgcaactatacagcttcgtatgtagttcgcagatcactacgtcattctgtacatgctgcttccatgctccacttggagatattccaaatgggttgttccactatacgtatccggtttgctacttagagtcactcagataggtgtcaaagcttgcatcgacgcaactctttacgtcatcctcattatcagctccatatccgagaagcatatccgtattcctctaatgatagttttgaccgctatctggtgatctactccttgataacctttgtatcctcttgccagatatgtatcagggcacacatcaagtgccgtacttataataccgtagagccgatgtctgaagcataagggactaccttcgt

SEQ ID NO: 7532 - DNA, 366 bp, Triticum aestivum
  Clone ID: LIB104-026-Q1-E1-B1
ggtccacgggcccaatggtgcatgaatcagatatccagcacgttgtgtcatcatggactggcattccagtggagaaagtctcgacagacgaatctgataaacttcttaagatggaagagacattgcataagcgtgtcatcggccaagatgaggctgtgaaagcaataagccggtccgttcgccgtgctcgtgtgggcctcaagagccccaacagaccaattgcgagcttcatttttgcaggtcccactggtgttgggaaatcagagcttgcaaagacgctggcatcatattacttcggctctgaagaagccatgatccggctggatatgagtgagttcatggagaggcacactgtgtccaagttga

SEQ ID NO: 7533 - DNA, 396 bp, Triticum aestivum
  Clone ID: LIB104-026-Q1-E1-B10
gggtcaattccaacgagtctgtaactgcagcgaggcgagcgtctgggacatgcattagtacatgcgattagataatcagtaacacaaacccacaaacggcaacctgcccttgattagataatgccatataaaatccgatggatggaacaacaaggtacgtgcagctgcatgcatgtaaaattgagtccatatccacgagtaaaggctgctgcatgcatatggcagcaagccagccagccagtgtacgtgcagctgcagcgaggcaaagggcctggatggctccggcactcttcggccttcccgaagtcgaagatcacttttcggtcaacagtaagttgaagttactattttcagcccagctgaccacttttccgccgattggaggctaaaaagctc

SEQ ID NO: 7534 - DNA, 312 bp, Triticum aestivum
  Clone ID: LIB104-026-Q1-E1-B11
ggggagaagggcattggagatggaacggtcagctatggaatggatgatgctgatgacatatacatgcggtcatggactggcaccattattggccctcacaatactgtccatgagggtcgcatctaccacctgaagctgttctgtgacaaggactaccccgagaaggcaccatctgttagatttcattcaagaatcaacatggcttgtgttaatcacgagaccggggcggttgacccgaagaagttcagtgtgctggcgaactggcagcgagagtacactatggaacatgtcttgacccagctgaagaaagat

SEQ ID NO: 7535 - DNA, 392 bp, Triticum aestivum
  unsure at all n locations
  Clone ID: LIB104-026-Q1-E1-B12
ttcacgggtgcacgggaaactaataagatgtaaaatagacccaggggccataggtttcactagtggcttctctcaagatagcataactattacggtgggtgaacanattactgccgagcaattgataganaagcacgtagttatgatgatatctaaggcaatgatcatgaatataggcatcacgtccgtgacanagtagacanaacgattctgcatctactactattactccacacatcgaccgctatccagcatgcatctagagtattaagttcataagaacggagtaacgcattaggcaagatgacataatgtaaaaggataaactcangcaatatgatataaaccccatctttttatcctcgattgcaacaatacaatacgtgttgttt

SEQ ID NO: 7536 - DNA, 336 bp, Triticum aestivum
  Clone ID: LIB104-026-Q1-E1-B2
ggggccacggggtttaccacaatcatccttgctgtacacaccttttgggataagcctatttgataagaatttgcagaaaaacccaagtgcctcacttataacctttgggcctgaaaattttggcccaatgcttcacttatatgttttagagcacgatggtggtgtcttaattttgaagaaattgctagtctctcatgattcacttatatcattttgagagtcttttagaacagcatggtatttgcttttgttacaaagttggtcctagaatgatgagcatccaagttgggtataataaaaactatcataaggaagtaaattggatgctatgattaa

SEQ ID NO: 7537 - DNA, 360 bp, Triticum aestivum
  Clone ID: LIB104-026-Q1-E1-B3
ggccgggaatcacttatagacttctacactagctctgggaagcgaaagccagaccaagttattattttcagggatggagttagcgaaagccagtttactcaagtgataaacattgagcttgagcagatcattgaggcatgcaagtgccttgacgacaagtgggagcccaagttcacggccattgtcgctcagaaaaacatcataccaggtttttccagacaaactcgccagaaaatgttcctcctggcactatggtggataaacaagtgtgccatcccaagaactttgacttctacatgtgcgcgcatgctgggatgattggcacgtcgaggccaacgcattaccatgttctgcatgatg

SEQ ID NO: 7538 - DNA, 328 bp, Triticum aestivum
  Clone ID: LIB104-026-Q1-E1-B4
gggtccacgggttgatcctgatgaaaatcagaaacttttgaacccagtaaattagtttttttaattcacataaacgtgattttgatcgtattctttttgatctggattggtacaaacatttctaaggtcttccaaatttggaaaaatttttggagttccagaagtatgcgtttgatgcaaatggcaaaaaacggtccggttttgacaaggtccccttttcaaggggtggttgcctaatttgaagcaaccaaggctaataaaataatttataaaccatagataagttgggatacaatatggttaacacacaaataaataaagaaagagt

SEQ ID NO: 7539 - DNA, 457 bp, Triticum aestivum
  Clone ID: LIB104-026-Q1-E1-B5
gggtccactaggccgtgtcagatcatcacgtgagacggactagtcatcgtcggtgaacattctcatgttgatcgtatcttccatacgactcgtgttcgacctttcggtctccgtgttccgaggccatgtctgcacatgctaggctcgtcaagttaaccctaagtgtttttgctgtgtaaaactgtcttacacccgttgtatgtgaacgtaagaatccatcacacccgatcatcatgtggtgcttagaagcgacgaactgtagcaacggtgcacagttaggggagaacacttcttgaaatttttgtaagggatcatcttatttactactgtcgtcctaagtaaacaagatgcataaacataataaacatcacatgcaattatatagttgtgacatgatatggccaatatcatatagctccattgatcttcatcttcggggctccctgatcatcttgtc

SEQ ID NO: 7540 - DNA, 427 bp, Triticum aestivum
  Clone ID: LIB104-026-Q1-E1-B6
ttcgccggtccacgggacgacaagacgccggatgtcccggagcaggccgatgcgtatggacgtgagttggtggtgaatgaagggcctgttacaatagagggtaagccgatggatgtccatcccacaatggaagatggcaatgtgcaggatgttgccgtggaggcagaaaatactactcgggcttcataaatcagaagagtggatgcaagatcagcaattggtacaaaaattctctgtgcttgttgtccatatgggtgaagaataaagaacttagaggtggttgtagaatgtgacgaacagcagtgtgctgtgcgcctctgcactcgtagctaagtgagtgaccatgttgtaagatggatttctggacaaatcaggtgtaaagatgtaagattcccaaacaatctgtacgtatatatatacccagact

SEQ ID NO: 7541 - DNA, 373 bp, Triticum aestivum
  Clone ID: LIB104-026-Q1-E1-B7
tgacgggcctcaagctctactgatgctattatggctgaagcagaacttaccttaaatgctcctgctgatgttgacgcagatctactgaaggatgatgatgatgctcagctactacagcaagcactcgctatgtcaatggatgagggtgcttcaggagctgcaaccgtggctgatgctgctatggcagaagctgctgcatatgaccaggatttggcattggctcttcaaatgtctgtccatgatgcagatgcggctggtcaatctgatatgagcaaagtgtttgaagacagatcatttgtgacatccatccttaattcgcttcctggtgttgggcccaatgacccatctgtgacagattcactggcatctttgc

SEQ ID NO: 7542 - DNA, 312 bp, Triticum aestivum
  Clone ID: LIB104-026-Q1-E1-B8
ccacggggagccataaaaaacatgctcagtctccgctggccggtgtccaagagcaacccaagccaagaaccaacctgccgggggcaatggaaacaatttaagttaatgggaaattgtgggcgctcacagggtcaaggttacctgcacaatgctagccacgtacttacttacagtgcatgtgccatacatacaacacatggacacttacacaaatggcacatgtgagacactcccgggggcaggcaccctaaactatgtgtacaatttacctgtggggcttacgtgcttttatgaggaggtaaacccctgtgt

SEQ ID NO: 7543 - DNA, 434 bp, Triticum aestivum
  unsure at all n locations
  Clone ID: LIB104-026-Q1-E1-B9
attccgggtccaatggaaaatggaatcaggagtggcaagagcctaagcttggggatgcccaatgcaccccaaggtaatattaaaggacaaccaaaagcctaagcttggggatgcccaagaangcatcccctctttcgtctccgttcatcggtaactttacatggagctataattttattcaccacatgatatgtgttttgcttggagcgtcattttttgcttgttgtttgaataatatcccaaaatctgaaattcttaaatgttagagagtcttcgcaaagttacataattatttagctactcattggtcttcacttatatctttcggagtagtttgttgtttgctctagtgcttcacttatatatttttagagcacgacggtggttttattttgaagaaatagatgaactatcgtgcttcacttatattattt

SEQ ID NO: 7544 - DNA, 387 bp, Triticum aestivum
  Clone ID: LIB104-026-Q1-E1-C1
ttcacgggtccacggcgagtgcgacaaaggtgccatggccgccatagcccagtctgcgccggattctgtgctgatgacattggcggagtttgagacggcaagagaggtgtggaatgcactcaaagagatgaggattgaataaaatcgtgtcacgaaggctcgggcacaagtgctgaagcgccaatttcacaagttgcagatggagaaaactgaatcggtgaacgactatgccatgcgtctgactactttggtgggagagatccacgcgcttggtgcaaagctcgacgagaccgagattgtggagaagtttttcagttcggtgactgataaattcacgtacatcatcggcacgctcgagcagctttacgacatcgacgacatgaccat

SEQ ID NO: 7545 - DNA, 168 bp, Triticum aestivum
  unsure at all n locations
  Clone ID: LIB104-026-Q1-E1-C10
gggacggggcgagaacgcagnggactcggacctgcagctggagcggattaacgtctactacaacgaagccaaccggggaccgttcgtgccccgcgccgtgctcaaggacctccaaccccggaacatggactccgtgcgctccgggcccctccggcaaattttccgccc

SEQ ID NO: 7546 - DNA, 278 bp, Triticum aestivum
  Clone ID: LIB104-026-Q1-E1-C12
ggggctcagtttatgaaatagaggtgaataatattttgagcggtatactttcattgtcaacataacaacaaaaaaatggcaaaaccttcaaggcaaaaaacataaaaggcggttccaaaccaaaatggtaaatttaaggcccccccttcaacaaacaaccatcaaccaatggcttgcccaaaacaatgattgcctcaaactaacaaaattcccggggggagttttgtttgcaattattttgatttagtttgcataaagcatggaactgggcatcccgg

SEQ ID NO: 7547 - DNA, 439 bp, Triticum aestivum
  unsure at all n locations
  Clone ID: LIB104-026-Q1-E1-C2
gggtccacggcggaagaattagcaatgctaaattggtgagaagagagcgagaggaagatgatgaggcgagatggaaaaggttgattttataactggatgctaggcttaaatcagaggacatggtancggaagaacaagatgtcatattctgaataatactgaaggtactttcagtaaatgttctgcaaataagtgcatccagaacgccaggatgtgtggggacaaaatgtactctattgcttcacatgggaatggcttcagttccgctactgtcacgagcctgaggttctgatcctacacctcggctgctcggccagaagctaagtcataccaatttatgttagttcttgagatttttttgtggctttggatttacagtctgcaaaatgtgtttatgcttttaacaatccttccagctctaacatacatatgttttttt

SEQ ID NO: 7548 - DNA, 444 bp, Triticum aestivum
  Clone ID: LIB104-026-Q1-E1-C4
gggtccacgggacgaggagatatcgggacggagagatccggcatgggcaaggctgtttggttggtgggatgggtggatcttattgtgaaaatgttctgatcctatggtggaagggtgaaagggtgtgtattatattagtctttgctttttagtttaccacaatcatcctttctgtacacaccttttgggagaagcctatttgattagaatttgctacaatactctatatgcttcacttatatcttttgagcttgatagttttttctctagtgcttcacttatattttttagagcacggtggtgtcttaattttgaagaaattgctagtctctcatgcttaacttatattattttgggagtcttttagaacagcatggtatttgctatggtcataaagtttggtccaaaatgatgagcatccaagtgggtataataaaaactatc

SEQ ID NO: 7549 - DNA, 277 bp, Triticum aestivum
  Clone ID: LIB104-026-Q1-E1-C8
tcataatacgaatctgtactctcttgcaaatttaatttaacggctgcgacgattacatgtctggatagaacatctgacgactcatctcaggttgaactgccgaggagagcaattgtttcttggcctgactgtttagatacaacttacgacgttgctgtctcgcatgtccctattgtgtcttcatctccgggcattgtcgttttcaattagctgtgatcatcgtttgctctccttgtctcctcacgcctctgtcgacgcctgctctcctgatctgttt

SEQ ID NO: 7550 - DNA, 392 bp, Triticum aestivum
  unsure at all n locations
  Clone ID: LIB104-026-Q1-E1-C9
cggggcgaaaggacacatattatggttacatagtggacatatgggaacttgactacggagtagattttaaggtccctttgtttaagtgcaattgggtcaatctgtcatgaggcggggtacaggtagacccacagtacggaatgacaacagtggatctgaaaaatcttgggtacactgacgaaccgttcatcctacgcaatgatgtggcacaagttatctatgtgaaggacatgtctaccagactgaggaaaagaaaaaataaggaagcgaatacatcatacgatgagccaaagtgccacatagttctttcaagaaaaagggacatcctgngagtggagggcaagacagacatgtctgaagagtatggaaactttcatgaaattcctcccttc

SEQ ID NO: 7551 - DNA, 370 bp, Triticum aestivum
  unsure at all n locations
  Clone ID: LIB104-026-Q1-E1-D10
gggtctgtcccaacagtttgtcggcgccttcatangcggacaaaagcctcatggccaggagagtgatcttcatctgctcgcccataaggaaggagagcccctgcgcaagtacattcagagattcagcagtgtgcagcacaacatcccaaacgtccaccctgccgcggtgattagcgcgttccatcaaaacgtgcgaaaccgcaggatgcgggacgaaatggcgatgtgcaagattaaggacgtcagtgagttatatgcactggccgacaagtgtgcacgtgctgaggaaggaaggagaccccccggagaaaaatgtaggagcgggaggatctaacattgaagatgctcccccggcaaggaaaaaccggcg

SEQ ID NO: 7552 - DNA, 174 bp, Triticum aestivum
  Clone ID: LIB104-026-Q1-E1-D11
cagcgacaaggggggccatcaagggaggatgtataaagccggaaaccgtcccgcccaccagaaagccgtgtttctgcctgccgtgtttgtttcatcgtgtttgtgtctgtctgtcgtcgtcgtcttcgtgattttgaactttctctagactgaattttgtacccgatttaaatt

SEQ ID NO: 7553 - DNA, 299 bp, Triticum aestivum
  Clone ID: LIB104-026-Q1-E1-D12
gtccgacattcacgggtgcaccgcgacggaacaatcacctacggcggctactccagcatggtggtggtgcacgagcgcttcgtggtccggttcccggacgccatgccgctggacaagggcgcgcccctgctgtgcgccggcatcaccgtgtacacccccatgaagtaccacgggctgaacgctcccgggatgcacctcggcgtgctgggcctgggcgggctcggtcacgtcgccgtcaagttcggcaaggccttcgggatgaacgtgacggtgatcagctcatcgccggggaagaagca

SEQ ID NO: 7554 - DNA, 370 bp, Triticum aestivum
  unsure at all n locations
  Clone ID: LIB104-026-Q1-E1-D3
cggtccgacattcacgggtccacggcgtcgtggccacgctgcgcaaggacgttgacagccttgcttccagccccatcacgaccacctcctcctacttctacggcaaggccattgccagggcggcgaggctggcgctgatcgccgaggaggtcgggtgccccgacgtcatccccgcggtgcatcggttcttgaaggccaccgtcacgccgtggctggacggcagcttccaggggaatggtttcctgtatgatcccaaatggggcggccttgtcaccaagcangggctgcangactccggcgcagactttggcttcgggatctacaacgatcaccactaccatttgggctacttcctggtatccattgctgt

SEQ ID NO: 7555 - DNA, 358 bp, Triticum aestivum
  unsure at all n locations
  Clone ID: LIB104-026-Q1-E1-D4
gggtccacggctgacaccatagtacacatatacaatggcaactcccaatttagtgtcataatccttcgataaacatggctgcaaaaaggcattatcagttattgtagaccccgttccgcctccggttcaaaaaaggcgtccctacggtactgatatagtgaaaagttcccatttttatcctcagcctatgcaaaggcagccatttatcatagtgaatgggctcccagtggaatcaccgccaatcgaagggcagtgacgtgcccaactggaaatggacaagtcatgtcaaggcagcanggctgcaataaatactctcccctccgagtcatctggtctcagaggttctttatcctctgaa

SEQ ID NO: 7556 - DNA, 442 bp, Triticum aestivum
  Clone ID: LIB104-026-Q1-E1-D6
ttcgcgggtccacgggggaatgggagcccatgaccgagtcatgggggtcaatctggcggttggacacgcggcgccccatgcagggacgcttctcgctgcgcagcaccaacgagtccggcaagacgctcgtcgccggcgaggctcatccgctcagactgggatcccaactgagatatacagctccatcactccagttcgactaatcttttttagtcgatcgatcatctgatctaataccatatatagatcggaaaatataatgtgtgtgtgaagacgcatcatatgcgtgcgtggtgtcggtgtatgtactataactgatgaagcaataaccgctctgtgatcgatcgagttggctcatcttagtgccatacgtagcacggtgagacgtcgcctgtgacctccggtgattagtgtcgtcctccaacgtgtaccccagtccatt

SEQ ID NO: 7557 - DNA, 79 bp, Triticum aestivum
  Clone ID: LIB104-026-Q1-E1-D7
gtgatcactatgctgagtcgtcttacatatgaaccaaccgagatttttcgtacatgttgtctaaatctgagacgctttt

SEQ ID NO: 7558 - DNA, 353 bp, Triticum aestivum
  unsure at all n locations
  Clone ID: LIB104-026-Q1-E1-E10
gggtccacggcatcctgggagagatcatcgaccacacggagtaaatcctcaagactggcatgtcacccgcgtcggagaagaacctggtggaggttctcctcggcctccacggaaatgaagactttggcttccccatcacccgctccacggtcaaagcatttatcttgaacatatatgcgggtgggacagacacatctccatggtatgggtcacggcagagctgatgatgaantcaaaggtaatcaggaagctgcaagaaaagatcagggccggcgttccgcgagatcaatctccggacgagcggaagttgcatcaagtaccttggcttggtgatcaaggagacgttcaagctg

SEQ ID NO: 7559 - DNA, 431 bp, Triticum aestivum
  Clone ID: LIB104-026-Q1-E1-E11
gggcatgaccaaattaccaggaaaaataataaacttgtaatatggcaattcttttaaaaaaagtgttatcagaaatgagatatcatgtgtgaagatttatggctttcaagccaaatggtcaatcttatggccagattcatggcatagtttgttcaaatgatctcatattatgcacaagggtgcatcttggaaaggcaaacaatgttgtctaagggagttttcattttctttggacaaaaaattcattttttatttttcgaatgcccaaaatgagtttttttttgtgaaggacctaccatatatttgtaacaaaattgggccaaataaattttccaaaatactatgccatatttgattcacaattgacaaaatagttgggtatcaaaagttttgatccacctctgatgaaaaagacaaaattccgccgattc

SEQ ID NO: 7560 - DNA, 356 bp, Triticum aestivum
  unsure at all n locations
  Clone ID: LIB104-026-Q1-E1-E3
gggtccacgtccgcggacgaagtgcagcgcatgatggcggagatcgacaccgatggtgacggcttcatcgacttcagcgagttcatctccttctgcaacgccaacccggggctcatgaaggacgtcgccaaggtcttctgaatcagttcatttcacctcagccgtccgatccaggagccgatccatctacgtacggcttcgtatatcaatttcatgcaactacctactccggtcccgatccagcctcagcttcacctgaagccggccctaattttgtttgatcaattttttgctactagtagtaactagtgatgatcactgttgcaccatttanttattttatatcgtcacaactt

SEQ ID NO: 7561 - DNA, 448 bp, Triticum aestivum
  Clone ID: LIB104-026-Q1-E1-E5
ttcccgggtccacgggcaccatagacaacgtcaaggcaaagatccaggacaaggagggcatgcccccggaccagcagcgtctcatcctcgctggcaagcagcttgaggatggccgcacccttgctgactacaacatccaggagtccaccctccacctcgtgctaaggctccgtggtggtatgcagatttttgtcaagacactgacaggcaagaccatcaccttggaggtcgagtcctcggacaccattgacaatgtcaaggctaagatctaggacaaggagggcatccccccggaccagcagcgtctgatcttcgccggcaagcagcttgaggatggccgcactcttgctgattacaacatccagaaggagttccacctccaccttgtcctccgcctctgttgtggcatgcagatctttgtcaagaccctcaccggcaagactatcac

SEQ ID NO: 7562 - DNA, 448 bp, Triticum aestivum
  Clone ID: LIB104-026-Q1-E1-E6
ttcccgggtccacgggggctcatcaaacatctcacaccatgcccatcgcaatgccttccatgccggctccggcactagccctggcactgctcggtgctttcggcctcgccatcgccccggctgttcagtcggcccccaccatcgaggccatccaagctacatgcgccaagacaatacagccagactcttgcaaacacgtcctgctcgccaacatggccgccggctcaccggaggtgaacagtgtcaccctaatgtccctgcaagtcgcggcaaagctcgccaagatggccaacggcttcgccaatgccatgctcaccacggacccgcaccccgccaaatgcctcgcatactgcatcgaagaccttcatagggtggccaacgcatttgacgggattccagtggaggcggttaaacctggcgacgaggccggggtgctgtccttcagctc

SEQ ID NO: 7563 - DNA, 454 bp, Triticum aestivum
  unsure at all n locations
  Clone ID: LIB104-026-Q1-E1-E7
ttcgcgggtccacgggcagatgatgattgaactgaactatctgaatctgaaaccgccgacccgactcgtgcttttttggactccgcttttgcaggatcctgtgaggcatcgaattctttggcaagtctcttcttgctagtgttgtacgcgttttattccttcgcccgacatgctttcgtgataaaagaatcatagcaacatagcgtgaggttccataggttgatgagcctgatcagtcgtgtaagctatttactacagccgtcttagatggccccaggtatcctcttcggcttgatctttcctttgcttcgatcgccaacttgcacttccttattccactattgcgatatctttgtcctggacaaagaccaagagctggtgcaggtgaaagaatagcttatggggctggagtcaaaggagctttcatagacatagaaatcataatanaaagagc

SEQ ID NO: 7564 - DNA, 456 bp, Triticum aestivum
  unsure at all n locations
  Clone ID: LIB104-026-Q1-E1-E9
ggtccacgggaatgttactatctacaaagctcgacttgttgcgaaaggttttcgacaagttcaaggagttgactacgatgagaccttctcacccgtagcgatgcttaagtctgtccgaatcatgttagctattgccgcattttatgattatgaaatttggccaatggacgtaaagactgcattcctgaatggatttctggaagaagagttgtgtatgatgcaacctgaaggtttcatcgattcaaagggtgctaaccaagtgtgcaagctccagcgatccatttatggactggtgcaagcctctccgagtttggaataaacttttttatagtgtgatcanagcatatggttttatacggacttttggagaagcctgtatttacaagaaagtgagtgggagctctgtagcatttctaagcttatatgtggataacatattgttgaatggaaatgata

SEQ ID NO: 7565 - DNA, 424 bp, Triticum aestivum
  unsure at all n locations
  Clone ID: LIB104-026-Q1-E1-F10
gggccacgggaatgcttgtattgaagttggcaagtcccatagcatgcacatatggtaaaagttgtgtaaacgtcttattgcatctggcgcgcctttgaatgccttctcttgagtggaggttcggggcgcgcgatggttaactcctaccaacctcccccctaggagcatgcatagtagtacttttcttcgagggctaataaaactcttgcaataagtatatgagttctttatgactaatgttgagtccatggattatacacgctttttacctttccatcattgctagcctcttcggtaccgtgcattgccctttctcaccttgagagttggtgcanacttcggcggtgcatcaaaaccccgtgatacgataacctccatcacacataaacctccgtataccttcctaaaaacagccaccatacat

SEQ ID NO: 7566 - DNA, 424 bp, Triticum aestivum
  Clone ID: LIB104-026-Q1-E1-F12
gtccacgggcgtgtagaaacgacatacctaaacacttaagcctctagtccaggtttatcgcctattcaggttccatccgcaggaagtccggccgaggttcccataatggccccgaacgatgtgaacagggttcccgaaatacctaacgggtattcggtacaccgtgcaatgtacctaccgcatcacagcccacccctacggtcagcgctgtccacggcctccagtacgctacaaacaccagaaactacttgcaactcctgaacagagagctacggtgaataagaagtcgagcggggtcatatttcagggcccaatgcatggtagtagctgtatcttaaatcacatatacagatctcagtgcttaaggtcggcttcaatgaaacaacccaccatgtaatcctacatggcctctcatcgatacctt

SEQ ID NO: 7567 - DNA, 389 bp, Triticum aestivum
  Clone ID: LIB104-026-Q1-E1-F3
cgggtccacctccgcggacgaagtgcagcgcatgatggcggagatcgacaccgatggtgacggcttcatcgacttcagcgagttcatctccttctgcaacgccaacccggggctcatgaaggacgtcgccaaggtcttctgaatcagttcatttcacctcagccgtccgatccaggagccgatccatctacgtacggcttcgtatatcaatttcatgcaactacctactccggtcccgatccagcctcagcttcacctgaggccggccctaattttgtttgatcaatttttttgctactagtagtaactagtgatgatcactgttgcaccatttatttattttatatcgtcacaactttccagtggttcctttccttcctcaacctttt

SEQ ID NO: 7568 - DNA, 420 bp, Triticum aestivum
  Clone ID: LIB104-026-Q1-E1-F5
ttccgggtccacggaaattaagtcaaaaaaaaaaaaaaaaaatataaacatctaaacaaaaataaacaaagaaatccagatccaaaagaacaggaataaaaaccaagtttcaaaaatatgacgcggccgatctaaaggatgaaccctaaattactcgtgcatgaaacttcaaacccctcctatagggtacccaattattaaattaaccgaccttcatttaaaaacatcgagtcgggaaaacccttgacattacccactttatcccccttgaaaaaaatcaccttttggcaatatgaagtcgtactaaatgggcccgcacggttcaccttaccgaaaaattcccctactaaatcggtaattgggatctccctgctaaaggtcaatttcgcacgaaggttgtagcgtttacgccaacattga

SEQ ID NO: 7569 - DNA, 458 bp, Triticum aestivum
  Clone ID: LIB104-026-Q1-E1-F8
gggtccactcctcgaccaatgacgctccatcccaaccccaccaatcttcaccgctgcttgacgacatggagctgaacaccgctgcaaccatggtggcgccccctctgaccaagcaaaaaaatttgagatatctcatatattggcaaagctaatgcctgagagggagctacccaaacaagcatgctttatatttggggtgtgtaggctggaaggatcattggtaattgatcctatcaaaggaaggcgcgatctccagcctgaaggaatggctgattgatttagctataggaagcaatcctgttctgcgattgattgctggaatcatatttatccaagagcaagactacacacgatgctgtcaagcacacacacacaacggaggaactctggacatttcatcatcttctgacattggaagaggatgcactaagttataaagtaataaagtaagacatgga

SEQ ID NO: 7570 - DNA, 250 bp, Triticum aestivum
  unsure at all n locations
  Clone ID: LIB104-026-Q1-E1-F9
atccatatccatatactaccaccgctaccaccaccgctgccatataccaccaccatatatccaccaccaatccnaattccttgcatattaagtttgttttcaggatccatctactttcccattcgtgtttccttgtctgagtacgtttctgattccagcaatcttttgcagtccatagaataagttggtttccaaaatcaaatacgaatccggaaacccccctccgtttaagcccaaaattttccgaaaa

SEQ ID NO: 7571 - DNA, 351 bp, Triticum aestivum
  Clone ID: LIB104-026-Q1-E1-G1
ggggccacgggggcgaataccataaccatcgcactatataataataaggaataataaaagtaagaaaattagacaagtatctatctcaagtaagaatttttttctttcagaaagaagataagaacaagaggctcaccacggtggtgccggcgacgagatcagcgcgggcgatcgacggcggttgtcgtggttttgtcacggcagatgtcctagagaaaggacttagtcgtggagccatcgctacgggttagcttaaaggggttaaagcggacaagggacgcaagagagttatatactagttcggccccttacgatgaaggtaaaagcctacgtctagttgtgatggaattg

SEQ ID NO: 7572 - DNA, 414 bp, Triticum aestivum
  unsure at all n locations
  Clone ID: LIB104-026-Q1-E1-G10
ggtccacggggcgaaatggaaaacgaagtgtggtcgaggttctacggcgccggcttctggaggagcccctcgtcgctcggcgacgagaacagatgatcggcacaggccggcggctcctgcatgcatgcgacgccctggcttcgtctacggctttcttgattcttgctcgggtaggcttccttcgttttcctcggagggaaaccgatgtanaggaggaaatgggaagcttgtgtgtcgtgtttgatccacaccgcattcttgttccacttccaccttatatccactatttttttcttcatccttttcttgttgggtgtacgtcctctacaagggaaatgaacacttcccttctttgttgccattgtatgcaactaaatatatataccgagtgatgtgattggggataaaaaaaca

SEQ ID NO: 7573 - DNA, 474 bp, Triticum aestivum
  unsure at all n locations
  Clone ID: LIB104-026-Q1-E1-G11
cggtccgaacattcacggggccacgggtacttggttagatacatgccaaatgttacgttcagattagttgcattatttcgttcattttttacccaaaaatctatacaaagtgttaattggacaatgtgaacaatgtggcatgtaccctgaaccctaacccccccccacacacacacaaaaccgtaaaaacattcaaaattttgccccacatggaaaccattatgcatgcattctctatggggtcatgggatgccatgaagaaagtttgggattatacacgcaagtacgatctctgacacgcgcatttccggcctagcatgtcaacaccccgaaagcccccttgaggtatagaccgatgttttgaccagtcagtccagaaaactagctttgtttgtgcaagagatcatgtgtgccaaaactgaagtgatttggangtgtccananaatcatcgcattccggaggggccatttggt

SEQ ID NO: 7574 - DNA, 304 bp, Triticum aestivum
  Clone ID: LIB104-026-Q1-E1-G2
gggtcaggccgccacagcaccgatcacgaaagaatggcttcaccagggagactagatggattcggcccggcgaactgatagggaggatagtgtacggcgaactgtctatgtctcagacattgatcaacatgtcactgaacagaaacttgctgaggttttctcaaactgtggtcaagtggtagattgccgtatctgtggtgatccaaactcagtgatgcgttttgcttttatcgagttcgctgatgatgtcggtgcaagagcagctttaacgcttggtggaaccattcttggtttttatcccgtc

SEQ ID NO: 7575 - DNA, 388 bp, Triticum aestivum
  unsure at all n locations
  Clone ID: LIB104-026-Q1-E1-G3
ggtccgacattcacgggtccacggggcggctgcggctgtcttctttccttgcttacgaggcggaggagaaggactacgatgcgccggagcagccggagcggcggcgggtctcttccgcccttgctgacgaggcggagaaggaggatgctggctgctctggcgcgccggcgcaggcagagaaggaggcggagtgccgccacgcgccggagaaggaggctgagtgccctgatcactcgccggaggaggaggcggagtaccgccacgcgccggagaaggaggctgagtgccctgatcactcgccggaggangaggcgaagtgcccttactcgttggaggcgtccagttcggaaggttgatgagctccttccgccataggcatggagtcttc

SEQ ID NO: 7576 - DNA, 394 bp, Triticum aestivum
  unsure at all n locations
  Clone ID: LIB104-026-Q1-E1-G4
ggtcgacgggcttctttgagcaatatgacacaaagaaaaaatgtcacggagattgttgctcgggcaacttctcgggcgaggaatgcaacgcaaagagccaaatcggtggggtgtttgacgctcttcgtgtcactgatgacctgttgatgaggagggcatattttaggaagcagcagcttgacaacaaaacaacatcacctaactctaactgaagaggacagccggtgtgatttgctcttacattgatatcgcatgcgtatgaataatggtccaatggaattgggagcggagtaagaagctcatgttgcctttatgcatgtaataatcatgcctgcctgcatggcccgctagctgttggtccaatgcctgnctgcctgcctgaactggcgtcaat

SEQ ID NO: 7577 - DNA, 136 bp, Triticum aestivum
  Clone ID: LIB104-026-Q1-E1-G5
taccgatccaacattcgcgggtccacgggcacatcctaagagattgttgcacaagcttgtgctgacaagccagcatcttcgttgcttcaaatctggccgaatttgtagaataaatacactacaacagattatcata

SEQ ID NO: 7578 - DNA, 455 bp, Triticum aestivum
  Clone ID: LIB104-026-Q1-E1-G6
gggtcgacggggagaagaacaccatcacgtacaacgagaatgctttcttgctgtcttgcaagtccatgatgtacattttgcacaaaccaccaaagcattttgaaaatttcgtcaaggagcacttcactcgcctcgcgccgcacatcctgggagcctgcaacgcatacctcggcggcgatctcgtcggtcatgctggcgacagcacgtacatatcagatgatggctgcaagagctgctcgaccggattcaagatcatgctcggcaagctactgccgaagctcgtcgccgccttctccgaagccgggatcgcccgtggccagtgacttcagagcgggcacacctcctgcatggcgatggcggtgacggcacgcccactgcgacaccggtattgtataggttttgcaataaaaatgctgcctggcacatgatccttttgttgcgtgacggcatcttgt

SEQ ID NO: 7579 - DNA, 471 bp, Triticum aestivum
  Clone ID: LIB104-026-Q1-E1-G7
gggtccacgggatcatcgtaaagaccctgccaccgcgccacctcagcagcctgcctgcctacatggcaccgcacgcatcgctggcctgagtgcgtgtcgaagcgggacggtgcggcgacggacgggacgggcctcgttcccgtcctcgataaagctaatggacacctaactagcgcatttaatgcattttgtcccctaacgtcaggcgataagctcacgcgctgtacacctttccacctcctgtgtgccaccgtggcaaccccttttcgactataaaacgaggcccgacgcatactggagagggattcggctttttggaactacacaaccgccgtagctagttcgaaagctcaagaacactcaatacatccaccatagcaggactatggttttacgcatcctcgcggcccgaacctgtgtaaacgatatttgtgctggctcctggacctgctcttctcacaaccccgcgcc

SEQ ID NO: 7580 - DNA, 463 bp, Triticum aestivum
  unsure at all n locations
  Clone ID: LIB104-026-Q1-E1-G8
gggtccacggggggcatgtatggttgggttttatttgtgtatttggcggaatttggcatattttaaccaaacccttcgcatgggctcgccgtgcatttgtatggtctggagaagcttacttgtcttatagtttagctgctttatctgtctttggttttatcgcttgttgttttgtatggttcaataatacagcttatccgagtgagttttatggacccaccgggccagaagcttctcaagctcaagcatttacttttctagttagagaccagcgtcttggagctaatgtgggatccgctcaaggacccacaggtttaggtaaatatctaatgcgttccccaactgnggaagttatctttggaggggaaactatgcgtttttgggaccttcgtgctccatggttagaacctctaaggggccccaacggtttggacttgagtaggttgaaaaaagacatacaacc

SEQ ID NO: 7581 - DNA, 387 bp, Triticum aestivum
  Clone ID: LIB104-026-Q1-E1-G9
gggtccacgggcttcaagacacctgaagacgttcgggatctcatccaagactcatgaacaacaatttggtgaccagtcatcagatatcccaatactactacaagcattggacgaacattatgcgtgtgaccctgcgggttcaaaaattatgtagtgcacaaccgagacacctctccagtcaataaccaatagcgacacctgggttcccatattggttcctacataatccaagatcatctttatccgtcgatgctttatgacatcatacataagtcgctttgtcagtccgtacgttacgtgcacaagattcgatcatcggtatcactatgcctactttaaactcattattggcaagtcgctttactcgattcatagtacatcatcctg

SEQ ID NO: 7582 - DNA, 376 bp, Triticum aestivum
  Clone ID: LIB104-026-Q1-E1-H10
ccatattcgaggaggaaggcgggcggccggacgccatcatgatcctgacggtgaagcgcgacaacatctgcagcttcatctcggaaaccaaccccgggcacttgcggtcgtgggagaccaaggacagccagctgacgatggtggcggacgacctgaagccgcgggcggtgctgacgtgcccggagaagaagttgatccagcaggtggtgttcgccagctacgggaacccgctggggatctgcggcaactacacggtgggcaaatgccacacgcccaaggccaaggagattgtggagaaggcgtgcgtggggaagaggagctgcgtgctggccgtgtcgcacgaagtgtacggcggggacctcaactgcccgggcac

SEQ ID NO: 7583 - DNA, 330 bp, Triticum aestivum
  unsure at all n locations
  Clone ID: LIB104-026-Q1-E1-H2
ccggcaggatatctactcaggctgggaattgcctgaccaaggtaattacatatgcaattcccccttctaatccaattcagcaatttgcaggtacttatgaaacaaaaaaaataactgtccgtgatcttgctagatgaggtggccgagtggaaggctgccgggctgggtgtangaggtctccaacgattcgtgagaagttagcctaagattctagttaagtgtgggtgttgggttgtacctgtgctacacgtttgttcccattcgtggcgcacgtcttgtaaatattttttcccttctataaaaatatggtacgtctttgtcgtattcttg

SEQ ID NO: 7584 - DNA, 226 bp, Triticum aestivum
  Clone ID: LIB104-026-Q1-E1-H4
gggagctaaagctgaacatcccagtgtccggcggcgaaaggtcccggctcatcatgagggccaagggcaactaccggctggtcctgaacgcgagcctgtacgatgacatgtcgctgaaggacatggagaagaagggcgtgacgttcgcctgcatcaacagcaccggcgatacccaggcaatgctcatcacgtacgccctcacgttcaaggacactgtcgtcacgga

SEQ ID NO: 7585 - DNA, 454 bp, Triticum aestivum
  Clone ID: LIB104-026-Q1-E1-H5
taccgatccaaaattcgcgggtccacggggacaatcaaatcatcccacttgccatggcatttgtggagggtgagaactttctcagctgggtatggttcttccgccaagtgaaaattgccatcgtgaaggaccgaccaaacgtgtgtgtcattcatgacagacatgctggtataatgaaggtcgtgaagacacttcgtaatccaacagatgatgaaccaacaccttggagggacttgcagagccggtggtgcatgcgccatcttggggctaattttttctcacagttcaagaacaagcggttgatgaacttgttcaaaaaattatgcaagcagagccagcagtgcaaatacgaatttatttggtcaaaactagatgagtttactaagaagcaggtccgcgcgaggaagaaaatggaagaagatcaggttaaattagcagcactcatcgcggagct

SEQ ID NO: 7586 - DNA, 391 bp, Triticum aestivum
  unsure at all n locations
  Clone ID: LIB104-026-Q1-E1-H6
cggggcatccccaatttcttcttcaacaactatcggttagtatcggttgagcctaagtttttgcttcttcacatgagttgtgctatccttgcattgtcattttattttgttttgcttgatgcttgaatacaataccaagatctgaaatcctttaatgagagagagtatttgcatagttgcataattatttagctactcattgatcttcacttatatctttcggagtagtttttgttgtttgctctagtgcttcacttatatcctttagagcatggtggtagttttattttgaagaaatatatgatctatcatgcttcacttagattattttgagagtcattaatagcatggtaatttgcttaatgtttaaatacttggtattcangatatg

SEQ ID NO: 7587 - DNA, 401 bp, Triticum aestivum
  Clone ID: LIB104-026-Q1-E1-H8
gggtccacggggagcgccatacttatctctgcaacaacggtgttgttacaggaatggtggaagactacgcaagtatgcgagcgcccggagatgctttttgcagtttttgcaacatgagtcatattgtagaaaattagatgcggcggagatgttgcattaacttttgcaacaagagtcttgatgcagaaaattagacgcaacggaaaatgttgttgtaatttttgcaataaggatcttgttacagaaaattagatgtgtgaaagatgtgcaagaaattagacgcgtaaaagatgttgttgttgcagaaaattagacacagtgggagatgttgtttgcaatttttccaagggtcctgttgcagaaaactaaagaagaagaagttttgcaacatgggtcctgtt

SEQ ID NO: 7588 - DNA, 225 bp, Triticum aestivum
  Clone ID: LIB104-026-Q1-E1-H9
ggcaacacttaatctaaacgtgttatttcatgtagagctcagatcagcgaaacactggatgtgggtttcagggactttttgaatgggaatttgatggcactatgctgcgctgtgatttggaagttctcaacacgcacagtacatgtgaaattctcttacgtgcaagtcatctgctctaatctcgccatttttgaaattacctgaaaagcagcaactctacaggat

SEQ ID NO: 7589 - DNA, 395 bp, Triticum aestivum
  Clone ID: LIB104-027-Q1-E1-A1
cgggtcggccggcggcggaggctctgatcttgggcgcagtggcgtggggcggcgctatttaaacgctgcacccggactgtgtctggcccaggtaccggccgagctctgttcactgatttgcatcacagtgcaccccgagtcgagctctattctgaacatgctccagaacacgctgggtaggattccctcgacctcctaaaacaagccagacaaagggacaaggtccgatggggcatcaatgcacatttcttgcatccatatcttgccaaaattctgataagtcaacgccttcaatccgggatacatgctcgtctgattggattaataaatcctcaatatttcctcacttagggaagatcgtctcatcacctccctcatagtcttgtccacattta

SEQ ID NO: 7590 - DNA, 311 bp, Triticum aestivum
  Clone ID: LIB104-027-Q1-E1-A10
gtatcgctataatgagtcttatgaattgttgcgctacggctgtgagttctttatggctgtcgttgagtctatggtgtagaagcactacgcagcttccgcgagtgccagccatgtcgataccgcacacctttcgcgcggtgtcatacagcgagcagatgccttcctcagaacagccagcagacgtacatatcatggtattgtccagagacgattccatgatagattgccatgcagctttccaccgttgcgtctaggaggcatgcttcatcattgtcataatgcgttgcatgatcatgtgcttgacattgttt

SEQ ID NO: 7591 - DNA, 289 bp, Triticum aestivum
  Clone ID: LIB104-027-Q1-E1-A11
acggggaaactatgtgtcgtattacttttccaacaacttatttcaattctttatcaataatgttgcctccatggattttaagtaactcttcagctttcgaggattgcctacacgttcgaagattacatacctttccatggtactttatagcccttatatattttcatcaaaattacctatcatcgtattctatcatggtatttctatatggttccgacatatattgccatgcatctttccactgttccgtttattatgatacgcttcatcattgttatcttgctttgcc

SEQ ID NO: 7592 - DNA, 234 bp, Triticum aestivum
  Clone ID: LIB104-027-Q1-E1-A2
gcggcggcagaactgattttgggcgcgtcggcttgtggcgagcctatttaaacgctgccccctggcggtgtcgcgctcgggtacggcccgaattcggttcgcgtttttttagtccgtgcagaacagaaagagggagaaatactaaacggactccaaaaatcctgaaataaattttccctggcttctaaaatcaggccgcacaaggtgaacatttatttgaggcctaaatgcaat

SEQ ID NO: 7593 - DNA, 117 bp, Triticum aestivum
  Clone ID: LIB104-027-Q1-E1-A3
tttccttcgggcagcaattaatctttccaatacggagatgattcctgaattcaaatgaatctgtgataccattcaagataattcctggtacgcttttattaataaatcctcaatata

SEQ ID NO: 7594 - DNA, 452 bp, Triticum aestivum
  Clone ID: LIB104-027-Q1-E1-A5
acgggcttccaaaagttctttggggattgaggacaaccccgaaccgatcgaccgaaagaaccccattctttctggtctacggagccgaacagctttgccgagtgacctgcttcacaacgcaccccgagtcgagctctactctgaagatgaagcagaacaagcccggcaggacgcaatcgacctcctagaagaagaaagagaaatggccatggtccgatcgaccatctatcagcaagccttgcatcgattccatgccagaaatgtgaagagtcgagccttccaagaaggagacttggtcctccgagtggattaacaaaaaccacacaaactctcacctacttgggaaggtcccttcatagtcactagagtcctcctccacctttataacgtcgatcgccaagattgatgagcaacgaatcctgaaatgcggaactactttgccccttttatag

SEQ ID NO: 7595 - DNA, 231 bp, Triticum aestivum
  Clone ID: LIB104-027-Q1-E1-A6
cgggcttcaatatattcattcgggatagaggacaaccccgaaccgatcgaccgagagaaccccattctttctggtctacggagccgaacagctttgccgagtgacctgcttcacggggcaccccgagtcgagctctaatctgaagatgaatcataacattcccggcaggacgcaatcgacctcctataagaagaatgagaaatggtcatggtccgatcgacaatctagcag

SEQ ID NO: 7596 - DNA, 456 bp, Triticum aestivum
  Clone ID: LIB104-027-Q1-E1-B1
gtcgacgggcatgtggcaaataaaaatatagcttcaagtaaagttaccaatgaacgaagacgaaagaggggatgccttctcggggcatccccaagcttacgcttttggctactcttgaatatcttggggtgccatgggcatccccaagcttaggctcttgccaccctttattccataatccaaaaaaggtttaaccaaaactttaaaacttcacaacacaaaactcaacaagtaatcttataagctccgttaatgaaagaaaacaagaccaccacataaggtactgcaatgaactcattctttatttatttatttttgtgttaaacctactgtattccaacttccttaaggtttataaactaatttattagccatagatgcattgaaatacgcaaacaacacacgaataacagaatctgtcaaaaacagaacaatctgtagcaatctgtaactaac

SEQ ID NO: 7597 - DNA, 412 bp, Triticum aestivum
  Clone ID: LIB104-027-Q1-E1-B10
accggtcaagtactcccgggcggccggggatccggaagacggaggcgaacgaggaggcgaagctgagctcgttccagcaggagatcgtgcagctggcggcggtgctgaacggcgaccaccagctaagcagcctgcaggagaggatcagggagaggatgaacgtgagggaaggcacctcctacatgaggagcgccgtgcggcgcttcttcgaggccggcatgtcggccaagaggatgggcctcgccgacgacgagcagatcgtcaagatgaggccctcccttaccaccagaatgacctcctcccctgcagatcaagatgatagtccgtagagagcaacgatgcatacatacataggatgaagattgatgttggaattaccacaattcttagtactacacatacatacatagaa

SEQ ID NO: 7598 - DNA, 423 bp, Triticum aestivum
  Clone ID: LIB104-027-Q1-E1-B11
ggcactctacaaaagtttgcgcacttttccccacaagactcgatctcctccgttgggattctcgcactacatgatgtttgagaaacggatggccgagacaaagtctttcaaagcgctagcaccttacgatcgggtagacagtaccaacctacatcccctacatatgctagtctaccactgtaagagttcgcacgacttagtcaactatgctagagcctgtagtagcttgtggctgcatatggaagtttctagtatgaataatctcacgatccctttgagcctgggtggcggtccataaagaaaaacaggcaatcactggaatacccaggtgcctcaatccacccagatgtgtgtttaagttgccaccttaaataaaccattaaattaacaatctcacaatctatcaatggtacactcacccaa

SEQ ID NO: 7599 - DNA, 380 bp, Triticum aestivum
  unsure at all n locations
  Clone ID: LIB104-027-Q1-E1-B2
gggtcgacgggtgatgttttaaaatgaccttcccccgatcagagaatgggcttggtctggaacggattgagacggaaagcggtaatcaatcgccgcgtggtggaacgcttgttggagaagggtaagcgcctccatgtcgtangggtgggtaggccaatagaagactacggaacttagcctagccactcagttctgccccgagccaagtctatttagtgtcagcgaacacataccactatctatatataggtttttctttttcgtagaggttgtcgcttaagtccttggacccttccttcatgaagcttgaggaaacactcacttttcaatcaacngcattcttggttctgcacttaatcctgaacctgtgttgggttggg

SEQ ID NO: 7600 - DNA, 429 bp, Triticum aestivum
  Clone ID: LIB104-027-Q1-E1-B3
cccgggtcgacgggggagactcaagcgtctaagcttggggatgccccggaaggcatcccctctttcttcaacaagtatcggtatgttttcggattcgtttcgttcatgcattatgtgcaagtcttggagcgtcttttgcatttagttttcacttttcttttatgcaccatgccggtatgagatagtctttggttgatttatagaatgctcattgcacctcacttaaattatttgagttagggcttaaaaaatggctcaagttcctcaattaaaacatttgaaatttggattgcctgtttcccttcacatagaaaaccgccatttgtagaatgccctttttcttcacttatatttgttagagcgtgggcatatcttttgtagaaataattaaactctcttgcttcacttatatccaattagagagatgac

SEQ ID NO: 7601 - DNA, 419 bp, Triticum aestivum
  Clone ID: LIB104-027-Q1-E1-B4
ggtgtcgtgatatataaacattttgcgaatgattatctgtttacttaccctcatcacctcatgtagagggaggttgaaggagcttaaactgaaggcgttcatatggattttcacgggtgcacttgtgggattcacaattcctggtttcgcctacattggccttggagacacatcgccaggatacgcggttaacttctataacatcataccgattgccgccttcatcctcgcggtccttttcaggaaggagccactggacatgacgagcctggtggggaacatcaggttcattggaaccctagtctgtgttggaggaacgctggtgatcacccgttacaagggcaacgtgctgcacctttggcccacaaatatcatcggctaccacccgaagcaagcccgaactgcctttgggtaacacc

SEQ ID NO: 7602 - DNA, 437 bp, Triticum aestivum
  Clone ID: LIB104-027-Q1-E1-B5
cgggggagagtcagatagggataaccgcgagagacgagagtcgagtgagagggtggaagagaaggcgcgatgaagctcaacgtgaagaccctcaagggcacaagcttcgagatcgaggcgacccccgagtcctcggtgggtgaggtcaagagaatcatcgagagtgctcatgggcagaatgtgtaccctgcggatcagctgatgattatatatcaaggaaaaattcccaaggatgataccactctggaagctaacaaggttgcagagaacagcttccttgttaaaatgctgtctaagcctaaggcgtcatcatctagtggtgcttctactgcttcaaaggcacctgctaatcagtctcaacctgctactccacctgcccctgttgcctcagctgcaagataacaacttcacaggaacctgttgctgcatctgaaccg

SEQ ID NO: 7603 - DNA, 432 bp, Triticum aestivum
  Clone ID: LIB104-027-Q1-E1-C1
ggtaccgagctatcacgggccgacgggggttatagttgaaaaggatagtagtaacgatgggggaaactttgatgcttttgctaatactaatcctcatgaagaacctactattttgcacactaaaaagtttcacaatggtaaggggaataataatgggaaaaggggtaattcaagaatttcctttacttggtgccgggtgctttaaccactatgggtggatctattctccataaaactagtagtcttgcagatgctatatctttgctcatagttgaacttgaaagacaatttattcacatgcatccttccatacaaggaatttttctagagttttctaatattgagcattcttctgttaagcgcgcagctaccatctttctagcacatgagttcatatttataataaaagaggctagtgaaatttttgcacat

SEQ ID NO: 7604 - DNA, 414 bp, Triticum aestivum
  Clone ID: LIB104-027-Q1-E1-C10
acatgctcaagcatttcaatatggcggtctatccttggtcggacctttgagttccttttcggatagcggtcgcatattgctgcgtgccattataaccgacgcttggggatgattaaggcactccatgatattcaccgataatcacaagcctaagcttggggatgcccccagaatgcatcccctctttcgtcttcgttcattggtaactttacttggagctataattttattctccacatgatatctgttttgcttggagcgtcttgtattatactactcattgctttgtactttaccataatcatcctttgtcgtacacatccttatgggatacagcctactttgattataatctgctggaatactctatgtgcttcacttatatctttcgaacttgatagcttttggtccaat

SEQ ID NO: 7605 - DNA, 268 bp, Triticum aestivum
  Clone ID: LIB104-027-Q1-E1-C11
cggtgacaacaatgtgcagttacttgaacaattaggtgccaataatagcacattgaaagcctcaaaattgatcttgatgtggaaatgtcacttcttatttaccatctcgagtcacagaatatgcacgtttgtgaccggacggaatggctgcactgtttttccaactattatggcaactctttggtgtcgttcatcagcgtcatgtttgataaaaaataacttggtagtgttgcacttcctgaattaaattaatccgcctagctaaata

SEQ ID NO: 7606 - DNA, 439 bp, Triticum aestivum
  unsure at all n locations
  Clone ID: LIB104-027-Q1-E1-C4
ccgggtcgacgggggatgaatagatgcatgtggaggctggaggaggtcgatgttggagatgaacaatatcccatagagtcccgttttgcggtatgccacacccctcccgatgaacaggacccccgttttgaccgcaatgctccaacacatgtctgtttcctccgttttgcggtacgccacacccctcctgatcaacaagaccctgtttcgaccgtangaggtccaacacaagtccgtttcctcccttttgtggtacgccagacccctcccgatgaacaggatcctattttgaccgtgccggtcgaacacaaggtcgtttccaccgttctgcggtacgccaggcctcgtttccatcggctgttccgtccaagccggttggctcccaatgaacatgacatattctgacccagtcctttgcctcccgatgaacaggaccttg

SEQ ID NO: 7607 - DNA, 428 bp, Triticum aestivum
  Clone ID: LIB104-027-Q1-E1-C8
gtaccgaatcagaattcgccggccgacggggctgctgatcatcatcgggctgtatgcattcctctgggggaaaggggaggaaacacaagagcagcgcaagcaaagcagagaggcggcgaacggaaacgggagcgcggcaggtagtgggctggacagcgtgcaggttgggaagcacgaggtgcgaattcgcgtggaagtgagctagctaattatacagacacatatatagacagtattggcgcagaaggcagatgaaaggagtcaaatcaagatgaacaaatctctgagatcagatgtatatacatatgtatgtaagtatgtcttatgcagactcttactttttcgagataagaacaactctaatagattcgttaaaaaaaaattcatgaacaatgtgcagtaaggatcaactggaaacttgccttaaa

SEQ ID NO: 7608 - DNA, 341 bp, Triticum aestivum
  unsure at all n locations
  Clone ID: LIB104-027-Q1-E1-C9
gggcggccggggaggcggcgtatcatgatcaagaaccttgagaaggcggagaaattcaacgcgtcgtggcggacagacgcgcaggggctgtgcaagaagctcaactcacatgtcaagggcggcgtcgggccatttgggctctggttgctcgcctccgacgacctcaaggaaagaacagctgttttcttcagggtattcaagaacaatgacaccagctatgtcgtcctcatgtgcaacgaccctacaaggtcgtcattcgagtcgcagatctacangccgaccttcgccggcttcgtcaacatcgacattaacaagaccaagaagatcgccctcangacatt

SEQ ID NO: 7609 - DNA, 427 bp, Triticum aestivum
  Clone ID: LIB104-027-Q1-E1-D1
tccgggtcgacctccgcggacgaggtgcagcgcatgatggcggagatcgacaccgacggtgacggcttcatcgacttcagcgagttcatctccttctgcaacgccaaccccgggctcatgaaggacgtcgccaaggtcttctgaatcagttcatttcacctcagccgtccgatccaggagccgatccatctacgtacggcttcgtatatcaatttcatgcaactacctactccggtcccgatccagcctcagcttcacctgaggccggccctaattttgtttgatcattttttttgctaccagtagtaactagtgatgatcactgttccatcatttatttattttatatcatcacaagtttcttttctttcacaaaaaaaaaaaaaaaaaaacaaagaaaagcgacgcacagggagccagggccagc

SEQ ID NO: 7610 - DNA, 431 bp, Triticum aestivum
  unsure at all n locations
  Clone ID: LIB104-027-Q1-E1-D10
cggtcagtaatccgggtggacgggatcttgaaaaaagtagtttaggcattttgcttgtgtcaactatatgaaatctgcaaagtcttttttgtgtgcagaaaatttcacactctgcattacttgcaaaagatgctgattttgatcttaacaattatagttgttgttcaagcagtagaagatctggcaacctcacggccatctcattcgaaattgaagtcctatccttaaagtttagctaagtgtattatttattttctggtttaaattattttcctcatgtgacacaaaaggcttgaagccttcttttaactcgcacttctatgctaaccaaatttatttctggctgtcagaagagttcggagcgaagctggccagcatcttcgcatgtgacacanaaattgttgttcaagcacacaactgctgtatttcgt

SEQ ID NO: 7611 - DNA, 222 bp, Triticum aestivum
  Clone ID: LIB104-027-Q1-E1-D4
gatgtacaattatgtggggcagtgaggtgtcgatgaatatgggccgagtactaactcaccggaacggacgctgttcttgatgcacagaataggagggcattcttgcaccgcatgggggcgaatgagcacgtgactacacatcaaatggaatttcgcacattcctacgtcgaacgatcaactgccatctgaagccatttataaccttgacacattgagaagca

SEQ ID NO: 7612 - DNA, 459 bp, Triticum aestivum
  Clone ID: LIB104-027-Q1-E1-D7
aattcccgggccgacgggaggggcatgcgtagtagtactttgcttcgagggctaataaacttttgcaataagtatatgagttctttatgactaatgtgagtccatggattatacgcactctcacccttccatcattgctagcctcttcggtaccgtgcattgccctttctcacctcaagagttggtgcaaacttcgccggtgcatccaaaccccgtgatatgatatgctatgtcacacataagcctcattatatcttcctcaaaacagccaccatacctacctatcatggcatttccatagccattccgagatatattgccatgcaacttccatcatcatcatatacatgacttgagcatttattgtcatattgctttgcatgatcgtaagatagctagcatgatgttttcatgacttgtccgtttttttgagtccatgctacgctagatcattgcaca

SEQ ID NO: 7613 - DNA, 417 bp, Triticum aestivum
  unsure at all n locations
  Clone ID: LIB104-027-Q1-E1-D9
tccgggcggacgggatgctgaccaaggaggtggtacgcgcagcaacaaaggacttcggcagtgaaaatgtgatcggcattggtggctctggcgcgattgtgtttcagggggttctcccttctgggtcaagggttgctgtcaaacggttccaagctatgtggccgtgctcaaaggcgtttctgagtgagcttcgtgccatgcttgattgcccacaccaccccaatcttgcgccactcttgggatggtgctccagtgagcatgaccaggttcttgtttacgagttcatgcccaatggtaatcttgacagtgcactgcacacaaagggtggagcaatacttccttgggaggcacngtttcnggcggtgcttggtgttgcatcaacacttaaatttctgcatgatgaatgtgaacaccgca

SEQ ID NO: 7614 - DNA, 388 bp, Triticum aestivum
  Clone ID: LIB104-027-Q1-E1-E1
gggtcgacgggatgggcaacaaaggcgccgcgctcagcaacgccgtctcctactgggtctacgtgatcgtgctggctgtgtacgtcaaggtgtcgggctcctgcaaagagacgtggacggggttctccacggaagcgttccgcgacgtgctcagcttcttccggctcgccgtcccgtcggccctcatggtctgcctggagatgtggtcgttcgagctcatagtgctcctgtcaggccttcttcccaatccaaagctggagacttcggtgctgtccatcagcctcaacaccgctgccttcgtatggatgatcccctttggcctcggctctgccataagcacccgtgtctcaaacgagctcggagcggggcgccccgacgctgcccggct

SEQ ID NO: 7615 - DNA, 358 bp, Triticum aestivum
  Clone ID: LIB104-027-Q1-E1-E10
tgacgataagaatacgaacgtgcgacgacgtcgcgccttagcaatcgctaaaccaactccgagaggttactgaccacgctggagcacgatcaacctgaccacgagggtctgtttcctgcgagcaaacgaagaacactcaagaaactaagattgcactctggacattgcaactataatatgaaagctttagtgatcacggtggggttctgtcacatccttgtccggtcattgaacacacacgaagtagccaaagttgcagctatggcgaacgtttaatctaaacaaaaccctaactcgaaaccacgccctaagggctctacatgtcgaggaacatgggggaatttcgtggccctttggt

SEQ ID NO: 7616 - DNA, 408 bp, Triticum aestivum
  Clone ID: LIB104-027-Q1-E1-E3
tccgggtcgacgggaaccgtgaccgttgagtattcagaactatttcagttatacaatcaatacgcactctacaaatctatcgtcagttgctattgtctgtaagtgatttctttctgtagtttaagtcgcaagctaactgtagtgatcattttgatcaatcattacctgtaattagcctcactatattcttttctgtggtattatgcaggatgaagatgtatgaaatgaaaaaatctggacgctatggcattgggtccattgagccaaatagcaataatgagtagacatggaatattccaagttgtcgagcaagtttagaggaaagcatgctagagttcttcaagcgcctcaataccaatggagatatactacttccttacaacttcctgtgagtcacactgtcttgta

SEQ ID NO: 7617 - DNA, 406 bp, Triticum aestivum
  Clone ID: LIB104-027-Q1-E1-E4
ccgggtcgacgggattctttttgacacttaaggaaataatctacgaatcaccctcctccaggatgtttcgtcgtggtatcatggcaacccaactcctcgctacgtggacaatcgtttaccaccttcttaagtgtggaattgttgtccacctagtgaaccttcgtcatccgtttctttccacccctcttgatgcgtatctcgtgtctcaacctgagagatggttctatgtttcattccgtgagttgttcgacctttgagaagatcgatccttccagaatttttttccctctcgttgtcatgttagctaaaattctcaaaagcaggacatcaagacaaagatggtgatcaaatcaacgttcctatgaagtgcaagttggatcgtgaagattgcgctagttgcgttccc

SEQ ID NO: 7618 - DNA, 423 bp, Triticum aestivum
  Clone ID: LIB104-027-Q1-E1-E5
attcgccggccgacgggtggaataaccaacgatatgttgatcttcaatgattttatccgcacccagtcgctagttgaactacccatcaagggtaggacgtacacgtggagtaacatgcaagatgacccgttgctggtgcaattagattggtttttttcctcagtgcactggtcttcttcctagcctaataccactgtatcgcccttgggcaagcctgcttcagatcacgtcccctgcgtcattggcattgatttgtgcatcccaaaaagcaaggtgtttcattttgaaaactactggatacaacattcagggtttcacgagatagtgcaatgctcttgaagccaaccttgtcatgcggctaactcagcggctttgatctgtagaaagctaaagatactgcgttacgctttaaagtcctggagc

SEQ ID NO: 7619 - DNA, 418 bp, Triticum aestivum
  Clone ID: LIB104-027-Q1-E1-E7
attcgccgtccgacgagtgaaagaaacaccaatcgattgatattcacgtacacatatcgtgaatatataactgttcaagactgtcatccgggatgttcctgatatatctacttttcattgtgcttagtggggtttatgtcactgttgtttgttctcgctgccgctatgctatgcatctgccaagcaagcaacatctcaaacttgtgttgttataacttgttcagatggatcttatgtatattacgttgtttcattgtgcatctcacatacaatgtgtttcattttgaaaactactgaatacaacattcacggtttcacgagatactgcaatgctcttcgaaccaaccttgtcatgcagctaactcaccggctttaatctgtcgaactctaaatattccgctttatgcctgaatgtcct

SEQ ID NO: 7620 - DNA, 385 bp, Triticum aestivum
  Clone ID: LIB104-027-Q1-E1-F12
ccgggtcgccgggctatattaaatgcgaaatggctgagtatacttggaaaatctggtgtatttagttggccaatgattttgagtagtattatcatcatggtatgcttcaccctgctcctggaaaattgaacattatctccttgtatgctattgataacctggagtgtggactttcctgctgtggttcatatgatttgacgtgaatcggcttcagatgaacagcagagaaaacgggactcagcattctcagtgtcgtgtttgcttgctagcacatcttttctgggctccactcctacgcattgatttgtctgaccagttggcatggtttggaggatgtaaatatactacagaagatgcgtcatgtgacaagcctgccctagtgtgt

SEQ ID NO: 7621 - DNA, 453 bp, Triticum aestivum
  Clone ID: LIB104-027-Q1-E1-F3
gggtcgacatgcatgcgcaaggggaaccaggcgacttgccgtacgcggtaggttgccctgcgtttactcatgagctgcggcaagtccagtggcccaacacgaagaatttcaagccagacgtaccagagaagtacgacggcaagtcgcatccatcggagttcctcagcatctacaccaccgcggtgcaggctgccggggggcgggacgacaagatccttgccaactacttcccgctggtgctcaagcccaacgtcaggtcctggctcatgcacttgccggacgactccatatcctcctgggcagacctatgccattagtttgtcggcgcctttacaggcgtccacaaacctcatggccaagagagtgaccttcatctgctcgcccagaaggaaagagagcccctgcgcaagtacaattcagagatcagccgtgtacagcacaacatcccagatg

SEQ ID NO: 7622 - DNA, 457 bp, Triticum aestivum
  Clone ID: LIB104-027-Q1-E1-F5
aattcgcgggccgacgggagctgaacaataagagtaaagtacccgcagttgatgcaataaagtatattgcaatgtccgctggggagtatcaaggtgtgtggctaggaaggttacacagtgatctcatggatcgagatccaacaagtggtacttaatgttgatagcaagtcttaatttttttctacgtgaagatccagcacgccatgatagaagcaagcacattaatacggtgtatcactacataaaggactgcatggaaaaagggaaagtcaactacatttacaccaatgatcagatgatagatatgctaaccaagactttggaccgagagaagtttttgaagatacgaagaaggatcgacgtccgagttgtaatatggtgacgtggtgtttagggggatgattgttagaatttaacacgtagtcacaatcctggctcggacgtaaacaggacaccg

SEQ ID NO: 7623 - DNA, 459 bp, Triticum aestivum
  Clone ID: LIB104-027-Q1-E1-F7
aattcgcgggccgacgggcaagctcacaccaacgaggttagcaagggcaaaccactagattggatttcaggacaaccagtcgcagatgagcatgaacgcctccagattataaagaatgatgacctcgaagagctccaagaactcggttctggaacttttggaactgtatatcatggtaaatggaggggctctgatgttgcaataaaaagaatcaatgacagatgttttgctgggaagccatctgagcaagaaaaaaatgcggaatgacttctggaatgaagcatctaaccttgctgatctgcaccaccccaatgttgtggccttttacggcgttgttctagatgggcctgggggatccattgcaacggttacagaatatatggttaatggctcacttaggacggctttgctgaagaattcaaggaccctggatggacgcaaacggctaattattgccat

SEQ ID NO: 7624 - DNA, 374 bp, Triticum aestivum
  unsure at all n locations
  Clone ID: LIB104-027-Q1-E1-G2
cgggtcgacggggaaatcgaatggcctccataccgatcccatgtgcagtgcctgtgagatggctgttgtgtggatgcagaaccaacttgcacagaacaagacccaggatctcatactagattacgttaaccagctgtgcaaccgtctgccaagccccatgggagaatcagctgtggactgtgccagccttggattcatgcctgacattgagttcaccattaatggcaagaagtttgcgctgaaaccagaagagtatatcctgaaggttggcgaaggagctgctgcccagtgcatcagtggattcacagccatggacatcccgcctcctcgcggtcctctctggatcctgngagacgttttcatgggcccctaac

SEQ ID NO: 7625 - DNA, 458 bp, Triticum aestivum
  Clone ID: LIB104-027-Q1-E1-G4
gggtcgacgggaataagagcaagtgacagtgaaaagttactctaagactactgctgaatcaaatattcaacaatagtctcgaggactacacctagtgtgtgccttagcgtgcccccactggttcagatcagtactcagcagggtatgcccagcgtgagtccaaaaaagagagagaaagagagtacattctaagacctcacactactaggaaaaggcctactaatggcgcaccggttttgcctactaatggcgcactaccggtgcgccattagtagcacgccactagtattttttactaatggcgcaacacccgggcgccattagtatctgatatactaatggcgcaccacgaagtgcgctattagtatgtaagaacatgcgccattagtatgcctcccgggggggccatacgtaaccatgtgctttgtcatactaatggctcactctgtggtgatgcg

SEQ ID NO: 7626 - DNA, 479 bp, Triticum aestivum
  Clone ID: LIB104-027-Q1-E1-G6
ccggtccagctagcattggccggtcgacgggtggataaataacaatatccgagaatgtttttgccgaatccctaaaggtgttcggcgttgcactgcgagacttctgttgaaaatacacaaatagtttgaaagtgccatgggctcgaaaagcgaaaaaacttattcaaaatgttaatgtccgaactagatcaagtgttcggtgccaatccgaaaattggactttagaaaaaaaggtgcttctgccgtgctttaacatgacacatcctatctcaaaacttcaagcgggtcagcctacagcttcaacctcctatcccgaaagcagagtacttcttactaggcccgtttagcaaactacactctatcggctttgagagagaaattaagctccaccgctagcgaccgcacacttgtgtcaaaaaaaaggattggcaaatactactaacaactttgcagcgactactaagaaaaacacttatcat

SEQ ID NO: 7627 - DNA, 350 bp, Triticum aestivum
  Clone ID: LIB104-027-Q1-E1-G8
gccggccgattgggtcaccaacaatatcaatacctcatgtatcttcgcattattcagattgctttaccatattcttgcgcgttcttaggttatttggaacgaagacaccttcgaggccaggttgatcgtgctcgagcgtggtcaataacctcacggacttagtttatccattgccacagcgcaagctcgtgcaagtttgtactccgatctccaaagtcgtttccaacaggtcgatagttatcatctcagtgaaagatcgggacacgctctcctctagtaagtgagatcagttttcaagatgctcagtaagaatttctagttctcatagatgagatgtatattcttaccta

SEQ ID NO: 7628 - DNA, 365 bp, Triticum aestivum
  unsure at all n locations
  Clone ID: LIB104-027-Q1-E1-H10
tgtgttgtgaagttttcaagttttgggtaaagatttgatggattatggaacaaggattggcaagagcctaagcttggggattaccaaggcaccccaaggtaaaattcaaggacatccaaaagcctaagcttggggatgcccccggaaggatcccctccttcttcttcgtccatcggtaactttacttggagctatatttttattcaccacatgatatgtgtttttcttggagcgtcntgtantatttgagtctttgctttttagtttaccacaatcatccttgttgtacacaccttttgagagagacacacatgattcggaatttgttggaatactctatgtgcttcgcttatatcttttgagct

SEQ ID NO: 7629 - DNA, 377 bp, Triticum aestivum
  Clone ID: LIB104-027-Q1-E1-H12
gacgcggacgatcacaaattcatgaactttctttccatccttggttaactaactcgacccatgtatcctggcgataccccctagctggagataagctaccagttgctccttgaaagcgaacgatgaaagactgcacatgacacatagattgagttttgtccacggatgtcatctcccccctgccctgcccttatcttgccgtccccaagccaacagatgcatgtgcgttcagctgacgcggatccgttgttgatgagacgtttattaccaccgaaaaattacgattccttaagacgaagatattggcagaattcgaaaaggagaatgaatggcgactgtcaagtcaggtatggaaacgtgcactggtgcgagctaaa

SEQ ID NO: 7630 - DNA, 189 bp, Triticum aestivum
  Clone ID: LIB104-027-Q1-E1-H2
gttctgaaaccagggatgcgcaaggaagctgacgagcgaaccgggagcagcccagcttgagaatcgggcggctgtgccgtccgaattgtagtctggaaaagcgtcctcagcgaccgaccgggcccaagtcccctggaaaggggcgcctgggaaggtgagaaccccgttcggcccggaccctgtcgcccc

SEQ ID NO: 7631 - DNA, 459 bp, Triticum aestivum
  unsure at all n locations
  Clone ID: LIB104-027-Q1-E1-H4
tcggccgagagtgctattaaatattttaaaaacaaaaaaataaagaggggaacctaaaacttttcaaaaaggaaagtgaaagttataaagacaagcattgttgaagtgagagagctccttgaactttgttcatgctcacgggaactctgtgaatcttgatttacaaaaaatttcaaacaaaaataattatccctttggtcaattccaacctattaaaaaaataatggtgcaaaggttggctttaaggagtttaaaatgcttggtggtttgtacggtgcaaggcaaaaaccttgggtgtaatgccccaatttaaaattttaactggaaaggcaaacgggtccgattccttttgcactgtctttctgtacaaagtttctaattttcccaagttttggttaaatttttggggtaccataagtangtttaatgttcagatttctacagactgttctgtttttg

SEQ ID NO: 7632 - DNA, 372 bp, Triticum aestivum
  unsure at all n locations
  Clone ID: LIB104-027-Q1-E1-H6
cgggaggaagaagctgcagcctgcaggagcttgacttactacctagactctgtaactttcggtactcgtagccgtctgtttttacttttttttttacacggagaggtgctcatcttttttcgctgctgtatgcatgggtagctgtcagtggcatgttgcagaaaaggaaggcgactgaattacatactgtaagtagaagtagcagtggatgggaggtcccgttgggagtagggagcacagccaagttgacagtgttgttgatttcgacgtgtaaacttgctagtactaagctgcttaattacagtagctcattatgaagaggaattgagcgaaaaacaanaaagaaaaggaaaaaaaaaaagcggccgctct

SEQ ID NO: 7633 - DNA, 369 bp, Triticum aestivum
  Clone ID: LIB104-027-Q1-E1-H8
gggcaatggcaaagttgagtgtagaaatcgtacccctaacgtatcacttagtcgtcgtaagatcctgcaacatgagacgttgcagccacaaagggtcagtacattgaatgtactggcaaattcacaccaaagagcaatgatgaataaaggctatcactacatgcatatatggctggtggaaagctctatggttacagtttttgcaaaaagccaatttttccctactacaaaggaataaattttacttactatcattgtggttgtttaacaatgagaatggttgacactattctcaatcccaatttaacatcatcattaaaacccaacaaaatttattataagtaacatgattagattaacatgataatc

SEQ ID NO: 7634 - DNA, 281 bp, Triticum aestivum
  Clone ID: LIB104-028-Q1-E1-A11
ccgtgttaatccaaggatggatgcttgacccaactgtggttgtgtgtcattatggtccttatgtcaagctgttaattgtcgtgatttgccggttggaactctacatgtttgccaattaacctgtgcagcgggtgcaactttggcacagtgaactattacttactttgtgaaaacaaaaacgataaaagggaatacacagtgcggtcccgtcgctcggatggatgcttacgtaggtatgcatgcaacctcagtgatattccatcgagggacccacttacatt

SEQ ID NO: 7635 - DNA, 415 bp, Triticum aestivum
  unsure at all n locations
  Clone ID: LIB104-028-Q1-E1-A12
attcgcgggcagacgggaacggcatcatgcaagtctgatcgattcgaagcaggttgagttcagttcagctagaggaagacgaaggcgtttcgatcagtccgatctcctgctccttttacatgatgattactattatcttaatcttagtgcatgtgtatgtaatatgcaccatgaattggtagtgcagtgcagtgcagcacagcacatctctgaacctgggaaggtactactagctttcttttcactcagacaagtcgggagggggtttcttgtcagttagtcggtttctggcttgtcagtagctgtggtgcgtgtcgtgtggatcgagttagttgtactaccagaaattcggaatgacantggaaccatgcatagcanannnaannnnnnnnnnnnnaaaaaaaaagccggcggc

SEQ ID NO: 7636 - DNA, 393 bp, Triticum aestivum
  Clone ID: LIB104-028-Q1-E1-A2
tacggtctagtattccgggccgccgggcatgctaaaaagtggtatttattcataatttggttgccaaatctcatgcgtgcaatgcacgtgtaccttactctagtctaaatggtgtttctgtgcttagttctgctgagctgtacaactctgaaactaaaagttggattacacttccaagcatgaacaagcgtcggagaatgtgttctggagtcttcatggatggcaagttttatgttattggtggaatggccagtaacacggaggtgctgacatgcggtgaagagtatgatttagagaagggcacctggaggttgatagagaacatgtccgaggggctcaatggtgccagtggtgctcctcgccttgttgctgtaattgacaatgaactatatg

SEQ ID NO: 7637 - DNA, 373 bp, Triticum aestivum
  Clone ID: LIB104-028-Q1-E1-A3
ggcctatcaagaagagcagtaatataaagcttttgagcttaagcacatgaatcaagcccccagaatccgatggcccactgagccagttttaagttggcgaggaatggtggagcactgaaccttgccacacaacggcacccccttcgcctgatgaccttttccgatcacgatgacctcctgtcgctgctgaacgaattgggaacagtactggaggaattgtgatctatgtcaagggtgatgatgtctatggaaatgattgttgagtgttatgatacatatggtgatgaatggtgacgaatctaatgtctttcgtcaagacatgcaacaaagtgaagttatgaagttctggtcaatttagcttatgcataatgct

SEQ ID NO: 7638 - DNA, 402 bp, Triticum aestivum
  Clone ID: LIB104-028-Q1-E1-A4
tcccgggtgcacgggtacgacaaaatatgatgataattgaatttgttccgccgaaaaaacaaaacctttgaacccattaaaaaaaaattaaggaaaccacaggaacgatattttgcattgattcttagtgcaggatgacaatacagcaaatttcataggacatcatattttggtacgatttttgaagttccagaagttagcgttaggtacatattgctatacactgtactgtttttgacagattctggctttcgtgtgttgtatgcttagtttgatgcacctatggctactatgtaagggtatgaaccatagacaacttggaatacagtatgtttaacaccaagttaaatacagattgagttcattacagtaccttacgttgtggttttgtaatctttcact

SEQ ID NO: 7639 - DNA, 355 bp, Triticum aestivum
  Clone ID: LIB104-028-Q1-E1-A5
ctgctgataaacagaaactttgtgcgtgcgaatttagttttgttaaatcacagaactttttcattgattcgtttttcttctgatcaatatacaaattttacaggacttcctattttggtaggatttttagagttccagaagtttgcgttagttatagatttctacagattgttctgtttttgacagattctgtttttcgtgtgttgtttgcttaacttgatgcatctatggctagtaaaatagtttataaaccatagagaaattgggatacagttggtttaacaccaaaataaatacacaatgagttcattacagtaccatatgtggtggttttgttttctttcactaacggagc

SEQ ID NO: 7640 - DNA, 387 bp, Triticum aestivum
  Clone ID: LIB104-028-Q1-E1-A6
attcccggcccgacggggttgctataatcaaagacgcattgccccaaatgcctctagaaagatccgaagtaattcgagctgtaattgtacgtacatgtaaagagttcaaatgcgaagacggtataataatccgctatgatgacaatgctgcggttataattgatcaaaaaggcaatccaaaaggaactcgagtttttggcgcgattgccgaggaattgagaggattgaattttaccaaaatagtttcattagctcctgaagtattataaatactagtaggcgaaattgagatcaaagaattaatttagtagattgtgttttacgtatatgttttaaaatccaaaatgaaaaaaaaaaaaaaagaaaacatgttgattatagaaaaat

SEQ ID NO: 7641 - DNA, 452 bp, Triticum aestivum
  Clone ID: LIB104-028-Q1-E1-A7
attcgcgggccgacgggcagaacatcctagatacatttacaaagctttagttaacatgcatgaactattgtctcgttcatataaaaagatcaatgtacgagccacgtagacaccgacatgacaaaactaaaaagacattagaacatcagccttttgcacaaaggattatcagccaagaaagaagattacaatcaggaccgactacatcctagagcttgagtcaaaacgcacatcacttgcctccggcaacatcacagcaaccaccaaagaaaaaaataatggatcaccttttcacccaagctcaatgtggctccaacgctaatatgcaatttttcagtcctccaaaatagcttaccaaatgatggtgtcccggctgaggggcctctcaccatgtcgaatcctggcctggttgggccaacctgaggaccccttgtcggtttcgacttgggcca

SEQ ID NO: 7642 - DNA, 389 bp, Triticum aestivum
  Clone ID: LIB104-028-Q1-E1-A8
acgggcatgccagcctagatacatttacgaagctttagttaccatgcatgtactattgtctcgttcatataaatggatcaatgtacgagccacgtagacaccgacatggcataactaacgggacattagaacatcagccttttgcacagaggattatcagccaagaaagaggattacaatcaggacggactacatcctagagcttgagtcagaacgcacatcacttgcctccggcaacatcacacgaacgaccacagaataaaataatggatcaccttttcacccagagctcaatgtggctccaacgctaatatgcaatttttcagtcctccaaaatatcttaccaaatgatggtgtcccggctgaggggcctctcaccatgtcgaatc

SEQ ID NO: 7643 - DNA, 391 bp, Triticum aestivum
  Clone ID: LIB104-028-Q1-E1-B1
gggtacatcacatgtccaatattgaattggccgatggtggcggcatccgtggacaccgtatccttcatgaaggctccgtcgtggtgcccttactcctttgaattgctccgggtgaaaactcaatctttgggatcggatggtggcggctatcagtggtcgtttggcaccatcttggagtccttgttccgtcgttttccgtctcacctctcctcggaggattggaggactccgttggctccaagcggatcatcctcgcgtatgtgtagtggctttgtagtcattggggtggtgtggcggtgctcggcacccttgtatcttgccttgagtgtgtgtgtcgtgtgtggtggtggcgtgagtttgtatcgtcgtgatgctttgtgattggtgcctt

SEQ ID NO: 7644 - DNA, 284 bp, Triticum aestivum
  Clone ID: LIB104-028-Q1-E1-B10
acggtgttaacaattgtgagtctgcattgttgtatcgcgacctcaatgaatggaataaacgaaataacgctgttgttcaatcatcaggctccggttcagtactgcaccaagctgtgatttttgcctattttgaaaataagcacatgctgctgtgtttatttaaacaccatgaagcgcatacatgaaagaaggcatgacatataaaaagattaagcatcaacaaaaacgaggccgctcttaaggatcaagccttcctttagcgtcaatacgacgtcatacctctt

SEQ ID NO: 7645 - DNA, 395 bp, Triticum aestivum
  Clone ID: LIB104-028-Q1-E1-B11
aattcccgggccgacgggacgtatacaacgtatctatagtttttgattgttccatgctattatattatctattttggatgttaatgggctttattttacacttttatattatttttgggactaacctattaaccggaggcccagcccaaattgctgttttttgccaattttagagtttcgccgaaaaggaatatcaaacggagtccaaatggaatgaaaccttcgggagcgttatttttggaacaaacgtgatccaggagacttggagtggacgtcaagaaacaatcgaggaggccacgaggcagggggcgcgccctccaccctcgtgggcccctcattgctccaccgacctacttattcctcctatatatgtccatataccccgcaaacatcca

SEQ ID NO: 7646 - DNA, 213 bp, Triticum aestivum
  Clone ID: LIB104-028-Q1-E1-B12
acgggaccaataatacttatctataatttttgattgttccatgctattatattatctattttggttgttaaggggctctactttacagttttatattatttttgggactaacctaatatacggccgcccagcacaaattgctgttttttgctacttttagagtttcgccaaaatggaatctcaatacggaactcgatatggcacaacaccttc

SEQ ID NO: 7647 - DNA, 422 bp, Triticum aestivum
  Clone ID: LIB104-028-Q1-E1-B2
tacggtctatgattccggggccacttccaccaaaacaaaatccaccatctcatcgaaagacgggacacctttgcctctatcaagtggtatcagatttccaggttgctcggtgagattttacagttttttgtagtttagatcgagtctgttcttcatacctacagtccacgaaaaagccacaaaaaaaaattagggttagttcatcatatccgaaccaatctgagcctttgcataatctttttagggttttgctttgttgaatttgcggttgcatcgtcgtgtctagttgctggtcttagagtctagtcttttagagtttcgagttctggtcataagttgtcacgccgccgccgcaccatcatcatcacccctgccatctaccaccaccgcttatccgccaccgcttcgaatccgtatccata

SEQ ID NO: 7648 - DNA, 377 bp, Triticum aestivum
  Clone ID: LIB104-028-Q1-E1-B3
tcccgggcgcccggggaatctaatatcttgcacactaaataacttatcataggtagcggcaaatattattggaaaaggggttattcaagatttatttacttgtgccggtgtgttacccatgttaggtggatctattctccataaaactagtagtcttgtggatgctatatctttgcccgtagttgaacttgaaaggcaatttgttcatatgcatccatccatacaaaggatttttctagagtttcccaatattgagcattattctattaagcgcgccgccactatatttctagcaaatgagtttagatttattatgaaagaagctagtgaaattttcgcgcattataaagtagatggtggtcatcctcctatagaag

SEQ ID NO: 7649 - DNA, 415 bp, Triticum aestivum
  unsure at all n locations
  Clone ID: LIB104-028-Q1-E1-B4
tacggtcttagnattcccgggtccacggggccctcgacatctccatcgagaggctccaggagattcaggacgagctcgagaaggttaatgaagaagcaagtgataaggttttggaggttgagcagaagtacagtgagattcgcagacctgtctatcttcggaggtgtgacatcatcaaaacaattccagacttttggctgacagcgtttctaagtcatcctcttctcagtgagcttttgactgaagaggatcaaaagatgttcaagtacttggaatctgttgatgttgatgattctaaagatgtcaagtcaggctactccatcactcttaacttctctgagaatccgtactttgaagacagaaagcttaccaagtcatatgcctttgctgatgatggaacaaccacaataaatgc

SEQ ID NO: 7650 - DNA, 448 bp, Triticum aestivum
  unsure at all n locations
  Clone ID: LIB104-028-Q1-E1-B8
attccgggcgtcgacgggagaaaggatgaaatgttagatggctgtgacagtgaaggtgcaagctctgtgggtgaagacaacagcaagcagcggggttccaacgaggatggctgggaactgtgctgaactgaagatggctgaagatcgtcagggtttgcctgagtttgctccatataaataaataaaaatggcggtaataatcatttagaaccgtctctattttgtgcgagcaaaattagtgaacttgcgggacttgtcatggaatagctttgccttttgggaggcgactgaatatcagtaagttaaaatggtgctgacatgatatgtatataccgagattctagcttaatctatagtataaataaatgattggtgccatgtcaatgccaattttattgccacacanaaaaaccnaaccaaaggaaaaaccaaaatcaaccccaaacaa

SEQ ID NO: 7651 - DNA, 355 bp, Triticum aestivum
  Clone ID: LIB104-028-Q1-E1-C2
cccgggtccacgggagccacaacatctccgatgacggtgagctggtggcacgtcacaacaacggccgtggaggcgtgcggtgacgttgggtgaaggcgtccaaggcaacaacgacgacctgtcagggcaggcaagccgcacggcgagttcatggcttagaaggtgagtgttggaataagccacgccccacgctccatgatccggccggtgcgtgcatgctgatcaagccagttcggtggtccgcagtcgtggcgaagtgtagcgtgtgtgcacgctcgaatggggcgcatggccgggtgtgttgttagtgtatggcgtgagtctgttgtaattttgcccgagtcgctaggacgtg

SEQ ID NO: 7652 - DNA, 402 bp, Triticum aestivum
  unsure at all n locations
  Clone ID: LIB104-028-Q1-E1-C3
tccgggcncacggggctctatatacttcacttatatcttttgagcttgatagtttttgctctagtgctccacttatatcttttagagcacggtggtctcttaattttgaagaaattgctagtctctcatgcttcacttatatatttttagagtcttttagaatagcatggtacttgctgtggttacaaagttggtcctagaatgatgagcatccaagttgggtataataaaaactatcatagaaaaagaattggatgttatgatcaatatgatgcttgataattgttttgagatatggaggtagtgatattaaattcatgctagttgaggtgattatgaaaagtacttgtgttgagggttgtgattcccgtagcatgcacgtatggtgaaccgctttgtgat

SEQ ID NO: 7653 - DNA, 331 bp, Triticum aestivum
  Clone ID: LIB104-028-Q1-E1-C7
acggggccttcagtctgctcatgcattcttctgatatgatcttctcgtctttggtcacaacatagctgtcactaccttgacacaattccggttgacggtcatcatggatctaagcgattggtggccatgaaatctgatgtctgcgtgggtgtagatgtcgctctatatgtttaacttttatgttcctgtaagtctacgtcataactcttctatgatgtctgctacgtttatttcattggtcttcgttttttaacttcgtgatggtgatgtccctgtctttatccaacttattcacctttgatgcacatttttttttctccaactggcgtac

SEQ ID NO: 7654 - DNA, 377 bp, Triticum aestivum
  Clone ID: LIB104-028-Q1-E1-C8
gacgggcacggcaggcgcgcctggcgcgacgtacaccgacatgatgaagtcggcggcggagggcaccagggactacggcaagacgctggcgagcacggtgtacgacatgatcaagtccgcggtggcgggcgccacggactacggcaagaagctagcgagcaccgtgtactataaggtcgccggcgtcggcacggccgttgcgagcaaggcccagaatgtgacgacatcggccggcactgaggtgctttacggcgcggctccaacgataaacactaatgtgttgtgaactgcgccggggtcgatcgtgggatcgctggagaaagtcgcctgcttggtggttgggttcatctggggcttcacacggttctacacgtgtt

SEQ ID NO: 7655 - DNA, 429 bp, Triticum aestivum
  Clone ID: LIB104-028-Q1-E1-C9
gccgacggggaatccataaagaaggaggcaaagaggaagaaggaagagatggacgaaagaaagagaaagtacaatgtgaagtggaatgacgaggtcactgcggaagacatggaggcctaccgtatgacaagagtccgccacgacgattctaagaaagattttcccaattaagcgttcaagtcccctgtggttgcttggcctatgcctgaaccctttctgctgcgtgtcaaccctttgccggattgttgtctctgtactctctgggtgtctaggaacacgggatgggatggcatgccagctcgtgagttactgatgttgtgaagtacagatatgatcgcttgatgtccaaaggcagaacgaagtttgttctcatatgtcctttgaaacctccttcctggtaaccatggcatacgccactcatatggatat

SEQ ID NO: 7656 - DNA, 400 bp, Triticum aestivum
  Clone ID: LIB104-028-Q1-E1-D1
tccgggcccacgggggagaatctcgcccgccgcctgacgccaccgtcgtcgcgtccggcgctccgtggaaagaagagaaaacccaccgtcagccatggcgaactcggcgtcgggcatggccgtgagcgacgagtgcaagctcaggttccaggagctcaaggcgaagcgaaccttccggttcatcacgttcaagatcaacgagcagtcgcagcaggtggtggtggaccgggtggggcaaccgggcgagacctacgccgacttcaccgccaccatccccgccgacgagtgccgctacgccgtcttcgactttgacttcgtcaccgacgagaactgccagaagagcaagatcttcttcatctcctggtccccggacacgtccagggtgaggagcaagatgctg

SEQ ID NO: 7657 - DNA, 184 bp, Triticum aestivum
  Clone ID: LIB104-028-Q1-E1-D10
taccgatctagaattcgccggtcgacgggctcacacataaaaaaaaaaaaaaaaaaaaaaaaaaaaaaaaaaaaaaaaacaaagaagaaaataatagaaaataaaaataaatgcggacgcacaaaaggttcgatcctcacgttcgcgttcaagttacggctcatcgcttcgttactgctcccca

SEQ ID NO: 7658 - DNA, 414 bp, Triticum aestivum
  Clone ID: LIB104-028-Q1-E1-D2
ggtctaggattccgggcccacgggcctggctatctctctggaggaccggcgccatggcggcggcggcgctggcgcagggaactcctcgggcgattcgccgctgctcctgctgccgatgctggacgacgacatctcccgtgaggtccagcgcctagatgctgatatggaccgattcatcagggcccagagtgagcgcatgaggcagtctatattggagaaagttcaggcaaagcagtttgaagcgctggcctctgttgaagacaagatcctccgaaaaatacgcgataaagagtcagaagtgcagaacatcaacaaaaggaacctggaactcgaggaccagattaaacaaatggcaggggaagttggtgcgtggcagcaacgagctaagtacaacgagagcatgatcagcgcact

SEQ ID NO: 7659 - DNA, 409 bp, Triticum aestivum
  unsure at all n locations
  Clone ID: LIB104-028-Q1-E1-D3
taccggtcttatattcccgggcccacggggatgaaaatagcggagctcanatccgaagaaaaactagacaagatgcagcacaacgacgatgataatgtcgactgcggcgttggtctcggatgtgtacagaataattcctcgctatcaggtggtaataacgcaccggaacggacgctgttcttgatgcgcggaatggcaaggcaaagcattctttcaccgagcaatggtgattgacgacttgattacagacaagatagatttggcacattcttacctgtaaagataatttgccaaataaagccgtttataagctttgccactttgataatctcttgtactgacacaatttgaaagaattcctttgagaacaaanaattaaaaaaaaaaaaaaaaaaaaaagcggccgctc

SEQ ID NO: 7660 - DNA, 424 bp, Triticum aestivum
  Clone ID: LIB104-028-Q1-E1-D4
taccggtctatgattcccgggtccacgggagggtaagaaaaaagatgtcatgcaagttctttccataagcacgtatgactatttacggaatacatgcctacattatatcgacgaactggagctagtgccatatcgccctaggttataaccgtctcatgatgaatatcatccaacaagtcaccgatccaatgcctacgaatttatcttatattgttcttgctaagttactactactatcatcactgttacacttcctaaaaaactgttgctatcattgttaccgtttcctttactgctactactattatcaaaactatcatattactttgctactgatcacgttgctgcagataattaatctccaggtgtggttgaattgacaacttagctgctaataccttcaaatattctttggctccccttg

SEQ ID NO: 7661 - DNA, 403 bp, Triticum aestivum
  Clone ID: LIB104-028-Q1-E1-D7
acgggctacaaaaacctgctcgacgggagcttaatcttccatctgctaatgaattgattagttcgcagtcaaacaatgtggcaaatggcaatctggaaaacacacacgaagtgcaggtgaaccgaatgagcttatctcaatacagggacatccatagaaagattgttgagtttatcagaaagagataccatattctggaaaactgcttggacattgaatatgccgtgataaaaacatatactcctgttcctgatgatcttactgaacaaaatgttcctatgggacatagcccagctgttccagatatcagtgaagtgttgagagaacttccccctcttgtaccaatttctgccatagaagtggtttctgatggctcaactgaccaagcacaactttcccaacc

SEQ ID NO: 7662 - DNA, 414 bp, Triticum aestivum
  Clone ID: LIB104-028-Q1-E1-E1
cggtcttatattcccgggtccacgggatcataaaaatcatcatagcaatcatccttcggtaagcacgaaggggaattaaacaatgtatgagttgaagagttactctcattagaaggtgggcacgggtgatcaatccgctcttccttcttttgttcttcgctctcctcctcatctttttcatccaatgagctcacagtttcatcaacttcttcttccatagacttctgcaaaatattagtctcttcttggacagcggggtaatcctcagtatatagttcaacataggcattagaagcataattatcatagcaatatttaagtatggcaaatttttcagacttgtaaagagtagcatcatacgtttcaatcaaagaagcaatttcataagcacccttaaaagcaacaaattcctca

SEQ ID NO: 7663 - DNA, 450 bp, Triticum aestivum
  Clone ID: LIB104-028-Q1-E1-E4
ttcccgggcccacggggatcgccacatcgcactctcctctcctgccccccggcacttccagaacctcgatcgatcgtagctcgtgttccctctccttttcgcggcgatggcggtggatctgaccccgaggcagccggcgaaggcgtacggcggcgaaggcggtgcctactacgagtggagcccagccgagctgcccatgctcggtgtcgcctccatcggcgcagccaagctctcgctcgccgccggctgcatgtccctccccagctactccgactccgcaaaggtcgcctacgtcctccaaggcaagggaacctgcggcatcgtcctgcctgaggccaccaaggagaaggtagtcgccgtcaaggagggcgacgctctggcgctcccgttcggcgtggtcacctggtggcacaacaacccgggggtcggcaacggagctcgtcgtcctct

SEQ ID NO: 7664 - DNA, 455 bp, Triticum aestivum
  unsure at all n locations
  Clone ID: LIB104-028-Q1-E1-F10
taccgagctagaattcgcgggccgacggggcagctcatcggcaagacgcccatggtgtatctcaacaagattgtcaagggctgtgtcgccaacgtcgccgccaagcttgagattatggagccctgctgtagtgtcaaggacaggataggaatcagtatgatttccgacgctgaagagaagggcttgataacacccggaaagagtgttttggtggaagcaacaagtggaaacacaggaattggtcttgctttcattgctgcttccaggggatataagttgatactgacaatgcccacatcaatgagcatggagaggagagtcctactcaaggcttttggcgctgaacttgtgctcacagatgctgcaaaagggatgaaaggggccctagataaagctacagagatcttgaatangacaaccaattccatacatgcttgagcagtttgacaaccctg

SEQ ID NO: 7665 - DNA, 422 bp, Triticum aestivum
  Clone ID: LIB104-028-Q1-E1-F2
tacggtctatgttcccgggtccacattcgcctgcaagaaagcaacgagcgcgctttcctatttggggtcaagagtggcgctgatggtgaaggtaccaccagtgccatcctccttggcggacaccttcttagtctcaggtggagctgccattgccttcttacacttgccgatggagctcgatggcgcgtcctcgacggtggcgcggcactccgaggaggtgcgcttgccggagtaggcatcagagctcttgccggacttggtctttttcttcaccccgggagcttcagcggcaagtgtcctccgttctgctgcaggtgctgcttcccggtagatcttgtcggcacaaataagagcatccttcttgtcgccagggacagagatgacacttattgggcctggcattttcagtacgttgtacacat

SEQ ID NO: 7666 - DNA, 423 bp, Triticum aestivum
  unsure at all n locations
  Clone ID: LIB104-028-Q1-E1-F3
cggtcctagtattcccgggtccacgggcacttgtaacaacctgngagtttccccttttttttccttcataatttcggtttttcaaaatgtttaatctcttgagccatgtgtccaaatactgaaccgttttcattgttagatttatcaccttgagatattcgaaactggatcccaagttaatagatttccatgatattgtttccatagaaaagttgaaaataaaaaaaatccaaaagagtgaatacccaaaaaacaaaatccaaaaaaggccaaaaattggttcatgcaaaaaaaatgatgaatactgaaaaaagaaggaaaatattgaatcatggaagaacggtttgcagttttgcactttttttggaagcacatgatgtgcttttcctatttttgaagaagcataattaaatttgtgctttt

SEQ ID NO: 7667 - DNA, 292 bp, Triticum aestivum
  Clone ID: LIB104-028-Q1-E1-G10
acggggataacaatctgcagacggatgtagtgattgtgtatgataacaagcaatatgatcctattgcgatgcatgctgctgatagctcatctcaccttggtcgacactctttgtctgggagttactggtatatcgagaatgcttgctctaaatgatggatatggtcaagaggaagggattgacgaggctctcaaagtacatagctagtgattaccatcagcatccaacggaatgatagtccttcgttaacaccgatgaggttcatcaatgaatggtatatgtacgcatcttg

SEQ ID NO: 7668 - DNA, 401 bp, Triticum aestivum
  Clone ID: LIB104-028-Q1-E1-G4
cgggtgcccgggacagggcacaaaatacctgcagcacgagaatttcatggaatgagcagtcagttagtcaaggcaatgccgagtcttatttttacaaaagtccaggaagacaattgtacttcgtcaacatgtgccatttgcttggaagactacagtgttggtgaaaagataagggtgctgccttgtcgtcacaagttccatgctgcttgcgtggacctgtggctcacatcatggaggacattctgccctgtatgcaagcgagatgcaaatgctggaatgtcaaatttccctccatcagagtctacccctttgccttcttctgctattcccttgccagctgaatcgacagctttgtcttcttttcgttcaatggtagcagcatctcctccaaggacaataag

SEQ ID NO: 7669 - DNA, 405 bp, Triticum aestivum
  Clone ID: LIB104-028-Q1-E1-G8
gacggggaggataagctgcgcaatgctgtattgcttgtttttgctaacaagcaagatcttcccaatgccatgaatgctgctgaaataacagataagcttggtctacactctttgcgtcagcgacactggtatatccagagtgcttgcgccacaagtggagagggtctatatgaagggttggactggctctccaacaacatagccagcaagtcctgaaggcttccaatggattggcagggccgcagaagcaactagcggctggacaaatgactggaatatgtaggcatgttaaaatgctgccagagtgttgacatgtctttgtaagctcgatctttgagctgttatcacactgctactatgttgtatcaatgattgaatgtacacacgatgaaaccctttatgctg

SEQ ID NO: 7670 - DNA, 356 bp, Triticum aestivum
  Clone ID: LIB104-028-Q1-E1-G9
acggggaggataagctgcgcaatgctgtattgcttgtttttgctaacaagcagcatcttcccaatgccatcaatgctgctgacatatcagttaagcttggtctacactctttgcgtcagcgacactggtatatccagagtgcttgcgctacaagtggacagggtctagatgaagggttggactggctctccaacaacatatccagcaagtcctgatcgcttcgaatggattggcatggccgcagaagcaactagcggatggacaaatgactggaatatgtacgcatgttaaaatgctgccagagtgttgacatgtctttgtaatctcgatctttgagctgttatcacactgctact

SEQ ID NO: 7671 - DNA, 434 bp, Triticum aestivum
  Clone ID: LIB104-028-Q1-E1-H10
gccgacatgggcgacatgctgatgatggacaggttccgtcaatggcaggccacgcacaaccggtcgtacctgagcgcggaggagaggctgcgtcgcttccgggtgtaccgcgacaacgtggagtacatcgacgccaccaaccggcgcggcgacctcacctacgagctcggcgagaatgagttcgccgacctcacccaggaggagttcctagccaggtacgcgtcgtcctacgatggggtcggtgatgatactggcatcacgttgcctgtgggcggtggcgacgccgagctgtggtcgtccggcggcgacaatgatagctccttggaggctccgcctcccagctgggactggagatccaagggcgccgtcacaccggtcaagtcccaaagcgcaggatgcgctacctgctgggcgttcgtgacggttgcgacgat

SEQ ID NO: 7672 - DNA, 380 bp, Triticum aestivum
  Clone ID: LIB104-028-Q1-E1-H12
gaggataaactatgatgatagttgatttgattctgctaaaaaaacagaaactttgcacgcacaaatataattttgttaaatcacaggaacgcgattttgtgttgattcattttgctgataatcaataaacaaattttccagaacttcctattttggtaggatttttagagttccagaagtttgcgttagttacagattgctacagactgttctgtttttaacagagtctgtttttcaagtgttgtttgcttatttcgatgcatctacggctagtaaaatagtttataaaccatagagaagttggattaaagtaggtttaacaccaaaataaataaagaattagttcattacagtaccttatgtggtggttttgttttcct

SEQ ID NO: 7673 - DNA, 411 bp, Triticum aestivum
  Clone ID: LIB104-028-Q1-E1-H2
tgatcataaagcgcaacgaagaagcacattacaaaaactgggcaccgttgcagcgtaacaaaataatactgaaccgagaccacttccaagctagttcaagaaaggttagccttgcgcgggaactgctgcgcaagctgctgagcaaggctgtgagaccggcctagcatgtcggtcatagcttccaggtgtagctgtttagcgttgaggttctcattggtgttctccgcaatctttcttagagataggacttcaagtcaaagttgagttgcagaatgcctttctgctagaacttgggactgaagaagtcgaactgattcagacaacaaattctgtgagcttgtctgactgctagtctcaagtaacttgaacactgcaacaggacaagactttggggttgtctcgctatcttca

SEQ ID NO: 7674 - DNA, 429 bp, Triticum aestivum
  Clone ID: LIB104-028-Q1-E1-H3
cggtcttagtattcccgggtccacgggatcttggagtgtcttttgcatttagttttcacttttcttttatgcaccatgatggtatgagatagtccttggttgatttatagaatgctcattgcacttcacttatatcttttgagtatggctttatagaatgcttcatgtgcttcgcttatatcatttgaagtttggactgcccgtttctcttcatatagaaaaccgccatttgcagaaagatcttttgcttcacttatatttgttagagcatgggcatatcttttgtagaaagaattaaactctcttgcttcacttatatctatttacagagttgacaggaattggtcattcacatggttagtcataaaatcctacataaaacttgtaggatcactgaatatggtatgtttgattccttgcaataatttt

SEQ ID NO: 7675 - DNA, 443 bp, Triticum aestivum
  Clone ID: LIB104-028-Q1-E1-H4
ccgacggggaagataaatctccaccgccgaacctggcggcgaagctgatcacgaagcggctgtacgcggaggagtcggagtggaagaactgggtgtggcactcggagggggacctgatgctcaacgacgccgtcttcaccgacagcggcggccccaaccagaggaagttcgagaaggacgacctcatcccgcccaagccgggatcgtacgtcaccaggctcacacgcttcgccggctgcttgccgtgcaagcccggcaagccctgctaaacctaagtggccccgccggccggccggagccgatcccttccgaatcttcaattattgctttgttcaattcttttactcaaagattcgtgtatgtattatgtattactaggacatttgagtagtctacgggggtcaagtccgaggaccctgtaggttgttcttgtacctgcattc

SEQ ID NO: 7676 - DNA, 357 bp, Triticum aestivum
  unsure at all n locations
  Clone ID: LIB104-028-Q1-E1-H8
ataaagctccaggcgggaggagacccccgccgcgtcggtagacgagataatgccgcggcaggcagtggcgcagtcatggtttagatatgaaagttttggacaccgagcggaactcagtcgagagcttatatatgaaaactagtgagagagagaagactatatttatgcaattagaagagaactatatacattgtttttcccctaagctcaataaggtctgtgtcctttgtggactgcgtttcttctttgtagagacagaacatataatactgaggattgcagtcaaatggaaattaaattcaggtttgatactttaataaaaataacagcanaaaaagggggagagaaaacgaaaaa

SEQ ID NO: 7677 - DNA, 284 bp, Triticum aestivum
  Clone ID: LIB104-028-Q1-E1-H9
attcggcgccgacgggcataataaaactctagccgtttagcttttgccaccgcgtatctatcttccatcatacttctccatgcagtggcacactgaaggtgtacagatgcttcatcggtcaacaatgtggaggctgtcgtgtgctcatatatatgtaacatctctagatacgacacaatatttatgccatctataactatcacaagagatagtattgtctcataagctctgtaaggactgatgttctccgtcgattgggtctattctgtgtagcaacatcatac

SEQ ID NO: 7678 - DNA, 397 bp, Triticum aestivum
  Clone ID: LIB104-029-Q1-E1-A10
gggtcgacgggaagtggaaatcattcttcatttctgagcgtatgaagctgcttcgggtccttgatctggaggatgcaacatcagatataacggctggcgatctcaagaaggtagtgaaacggctgtgtcgcctcaagttcctctctctccgagggcatactgagatcgatcatctaccaagttcattaggggatctcaggcagctccaggccttggacgtcagggacacctccatagtgaccctgcctgcgagcatcaccaagttaaagaagttgcagtacattcgtgccggccgtggcaccaccgtctcagcactacctgcttcatcctgctggttgcccgatttctgcaagtgccgtcaactagttgatgttcaagtgcccggggaaattgggaa

SEQ ID NO: 7679 - DNA, 415 bp, Triticum aestivum
  Clone ID: LIB104-029-Q1-E1-A12
ggtcaagaattaccgggccgacggggactccgaattgggtgattcttttttttgttggaaactagatttcgtgcactttccaacccaattggaatcaccttcaaattcgtccggagcgttgagttgtgcacaaaacaatttgatgctgcagcagaatccgagtcaaactacaagtccaaaggtgttacatcacctccacttgggcccatgagccttgtatgacctaaggttagttttaggctgccttgggacgtcctcccacctccttggccgccaccccttcctcctatataagtagatccatctagtagctttttccttgggatttgtttagttaaaagttagccattgcaacttcgtgtacttcgtttgtgtccaacgaccagaccaagaccacttacggattcccaacctt

SEQ ID NO: 7680 - DNA, 236 bp, Triticum aestivum
  Clone ID: LIB104-029-Q1-E1-A2
tctgtaaatctccgttggtgcgctggtgactgtgcagtatgcgcagaacgtgattatccacacgatccacgttagcgttttcatcgttggcactggcggcaggatctcggaggcgccgcagcattccgggttccgtatccagtcttccggatatcgcgtgagtgtcttcggatctatcacgtgtggctcttatacttctccttctcgacctgccagtactgcctcattgtcgtcat

SEQ ID NO: 7681 - DNA, 435 bp, Triticum aestivum
  unsure at all n locations
  Clone ID: LIB104-029-Q1-E1-A3
cggggtcacgacgacgtgcacggcgaagacgagcttgatggcgagcgcatggaccacctcggctccgttcggtgctcgggacggatgaagacgtccgtggcgggcctccaggacgtcctcccacgcgaaggcgacgacggtggtcgcggtaatgacgatgacaagcgcggtcaccgtgagagtttccaagctcgaattcgagcgaaagaagaagggggcgactggggaaagaagggggaatggacgagggcggctagggttttcgttggacgcggttataggccatgggggagcacgtggaggccatccatggccacggcagccgtgggatggatgccatgacctcctctgaacgggaagaangggattgccgttaagttggcctggactatgcactgtaccagtgggctacaagtgcacagtagtagttaggtc

SEQ ID NO: 7682 - DNA, 440 bp, Triticum aestivum
  Clone ID: LIB104-029-Q1-E1-A5
ggaggttgagaagctgattggcaggatagtgaagtggctgaagcccggtgggcatattttcatcagggagtcctgcttccaccagtctggggattccaagaggaaagtgaacccgacgcactaccgggagccaaggttttacaccaaggtgtttaaggaatgccactcctatgaccaagatgggaattcctttgagctttctctggtaacttccaagtgcattggagcttatgtgaagagcaagaagaaccagaaccagatatgttggctatgggagaaggtcaagtgcacagaagacaaaggctttcagagattcctggacaatgtgcagtacaaatccactggaatcctgcgttatgaacgcttgtttggggaaggtttatttcaccaccggtggattcgagaccacaaaagaatttgtggacaagctggatctgaaa

SEQ ID NO: 7683 - DNA, 461 bp, Triticum aestivum
  unsure at all n locations
  Clone ID: LIB104-029-Q1-E1-B1
attcccgtatcgacgggtggcgtaaaccgtagggtgtccattggtggagccatgatgcaagcatccaaaacagacatattgtatacgaagaatgttcatgctgccaagagaagtgaagacattgcccatttgtcccctggatgggcgtgtaactagagaacaaaacactatggcggcaaacgagactatcgaaccgaactgattgtactgaaaactaggacctaaacttgtgctgctggccaaccttttcttcagggaatgccaagatattcgccaaacaaagccataggatggtgctatacacagaggacaacctatcagcaagtcgggctccagtgtgtttgggtcagcgtccacggaggagcagataactgacgacatttacgnctgccgggttcacaatcctcatcacacatgaccacaacccacccaaccgactgttacaatggtcgtggagcttc

SEQ ID NO: 7684 - DNA, 388 bp, Triticum aestivum
  Clone ID: LIB104-029-Q1-E1-C5
acggtctagcattcccgggccgacggggcaaatgacaggaagtcactacaacgagctctggataataagatatatcttctcctgtatggcaaaacttttggggctcctgatggcaaacctgtttggcatttcccagaaaaagtgtacgaaaatgaagactctttgcgtttgtgtgccgagtcagccctaaaatctgttctcggcggacttgacaatacatattttgttggcaacgctccaatggctcacatggtaactgaacaaaaagaggattccagtgtttcaccattcaagcggttcttcttcaagtcgcaagtgatcggcaccacgcatttggacatcaggaggtgcgaagaccacgcgtgggtgaccaaagctgagttgctgg

SEQ ID NO: 7685 - DNA, 398 bp, Triticum aestivum
  Clone ID: LIB104-029-Q1-E1-C9
gggtcgaggacatggtaatgccgtattatccatcgatgctatgtgacttgcttcaccaatggctttgcaccttgatccagattgttttcatgcaaagcctgtcatgtttgcctcctaatgaccacatccactaagtcagctctatctctctactactgcaactaactaactgtgatgatcttctccaggttttttggctggatactgagatggcaccattgtgctgctgaagttaaaccctgtttattgggacgtacaagcgggcggcaagcacacatggcggcaggagacaagccatattttaccaatgactgctgctaggattgatgtcctattgccggagaaacaatggcaacagtcgcaccgttttttcttagtttctttccaaggcactcaat

SEQ ID NO: 7686 - DNA, 344 bp, Triticum aestivum
  Clone ID: LIB104-029-Q1-E1-D12
aggatgaacagaatattaaccctgacgtagatggagcatatgtgtttgatagccatctatacaagtgcagaacagaagtcgaggctcttcttgtctgttacttgtcgtgccctcttccactctctcattttgagtccctgtatgagcaacggtacaagaagactctcgactaccaaagctgtggagttgatggtctggaggaactgcttaacaagttaaaagatgttgtcgaattgaatgtatatgagatcagcaacatgaaagtcatcaaagccaagtcaccaaaatgtagtccctcaaagccatgttaaatagtgggtgtcctaatatcagtagtatagtca

SEQ ID NO: 7687 - DNA, 448 bp, Triticum aestivum
  Clone ID: LIB104-029-Q1-E1-D4
ttcccgagtcgacggggacaaatcacacatagtcaacaccgcatgggcgatgttggcgcttatgaaagctggacaggccgaaagagatccgtctcctttgcacgaagctgcaagacttatcatgagcatgcagcttggcaatggtgacttcccacaggaggaaatgattggaagtttcttgaaaaatggtcccttgtgttatatggcttatcgcaacatattccccatatgggcccttggagagtatcatagattagtactttgctctggctaaactagtaccttctggtatgaaggaattaaatgtcgctcctctgctggcaatgctgaaagagcgatgtcttgatttacatgtcttgaagaaagaaacaagaagatagtcgtgttattataaggtggtgtgaatacctgaagttcatacataatagtataagactatgttgtaatc

SEQ ID NO: 7688 - DNA, 323 bp, Triticum aestivum
  Clone ID: LIB104-029-Q1-E1-E1
cgggtgactccatggatatacacacacttacccttccactgtgcgagcctctattatgccgcgcaactttcgccggtattatgaacccattatttaccttccttaaaacagccaccatacctacctattatggcatttccatagccattccgagatatattgccatgcaactttccaccgttctgtttattatgacacgctccatcattgtcatattgctctttgcatgatcatgtggttgacatcgtatttgtggcaaggccaccttcataatttttcatacatgtcactcctgattcaatgcatatcccggtacaacaacg

SEQ ID NO: 7689 - DNA, 401 bp, Triticum aestivum
  Clone ID: LIB104-029-Q1-E1-F12
gggccgacgcgctgaaaaatgttcagaattttttcaagtcccgaattcccgagttcaaagttcaagtcataaatgtggaggtgcccgaggaagctgaattagttgcggattcgtcagacgagttagtgcaagatgatgtgaagagcacatcagagagttcattggaggagcctagcacggaggaattccaggaggaagatgtctctgatggagattcagactcgaacgacgaaagtaaggggccggaagtaaggcttttcatcagcggagtagttcataataaagaggaggctggagcaaaatcttatgttcgagttcccgctgaaataaataacctggaaagggactcctttgaactctacatccctggaaaaggttctgatcgggatctgagtgaaaca

SEQ ID NO: 7690 - DNA, 457 bp, Triticum aestivum
  Clone ID: LIB104-029-Q1-E1-F6
acggtcaggcattcccgggccgacgggaaacaaacggagtgtggaggtgctataataagcaaacttaccaattcccgttggccaaagggctctttcatagaatcttccgacctatggcaacgggagtggttttacatcactgaacctcgcggcaaaaagtgggtagctacacctgcattccattatgtccctccattacaacttgcatcctggattaataaggggccagactgggtatccgttgataaagtgcagacgctgcaaagccgcattcggagcctcattgaaaaggacaccggtctcatcaatataatccaagtaatgttagtccgtcgggtcctaccgtgtcagcgacgtcctctctgcatgtgggaattcaatccggaaggaccgtgaacccttcaacacctctctggcacgacgctccgaggggtgtggaaattattcttcggcgcat

SEQ ID NO: 7691 - DNA, 393 bp, Triticum aestivum
  Clone ID: LIB104-029-Q1-E1-G10
gggccgacgggcatggcatgctcgaaacaacgagtgcctccaacattcaacgggtcctagggggagttttgcttgccattattttgatttagtttgcataaatcatgggactgggcatcccggatactagccattttctcgtgaatgaggagcggagtccactcctcttgagaataaccagcctaacacggaagataagggcaactctagttgacatatgagctattcgagcatgcaaaacagaatgtttatttgaaggtttagagtttggcacatacaaatttacttggaacggcatgtcaataccgcatataggaaggtatagtggactcatatggaacaactttggggtttaaggagtttggatgcacaagcagtattcccgcttagtac

SEQ ID NO: 7692 - DNA, 394 bp, Triticum aestivum
  Clone ID: LIB104-029-Q1-E1-G12
attcacgggccgacgggggactacatggcgaggatggcggccgccgagtcgacggaggagtacttcgaggactacgccgccgccatgatcaacatgggcaggatggaggtgctcaccggcggcaacggggagatcaggaaattctgcagcgcgtacgttgactaatggagccggcggttggtcgatgtgagttggtgcgcgtgcctccatcgatcgtcatgtggacggggtcacgacggccggtgtgcccgccagccgcaaggcacttgcattattctaggggtggttagagaattgacaccgtcacaccgccacgcggcgaatcttccggtgtatgtaaaaaaaagtcgtctctttgttcttgaccgagtgcccattgagatttggcgagctg

SEQ ID NO: 7693 - DNA, 414 bp, Triticum aestivum
  Clone ID: LIB104-029-Q1-E1-G9
tgacggtctaaaattcacgggtcgacgggcgatgacagccgcagttaagcgctcgacggcgacgtgcaaattgcttgctaaacgtacccaggaatgtgtcgtgtcgtgcgcgcgtgtggcccaactgttttttttagcatcagtacagacacaagcgctcatatacacgcgcatacactcacccctatgaacgcacacacgcacaccttacccctatgagcacctccgaaagacggatccggaaacttatgatgatgcacgggtgcggtgcacgtctggtccgaacgttgacgatggtgcccattttctgcagtctgcaccacattttattgacctgcattgtatttgtatgttgggcctggcaagtttgactcctctcggcgagcgtataaaaatgccactgggttgttgttg

SEQ ID NO: 7694 - DNA, 375 bp, Triticum aestivum
  Clone ID: LIB104-029-Q1-E1-H12
catgaacgcgcgacggaccgccgctgttgtgacgcatgccaggcggactgtgagccatgtcgaccatcaggacctcttccgcgaggtcgctgctgtcgcactcgaatagggtctcgacggagccagtcgacagatcaaacaggccgtagagagattcgtcgggctcaattgccgcgacttgaggggtggccgacttacgtgccaccacatgcttcacccaccactgaagccgtgactgaccggatctcttgtgacggcgagcggcggggagcaaagatgttgcgggggccaaccgatattgagttgccggctgccacagaaggacaccgcgaatgcacgcgcaaaagtgcgtcgccccgcggacgcggagcgcct

SEQ ID NO: 7695 - DNA, 447 bp, Triticum aestivum
  unsure at all n locations
  Clone ID: LIB104-029-Q1-E1-H4
ttcgcgggtcgaagggagcccaaagacggcggagaagccgtcggcaggcgacatcgtgtcgatggtgatgaggagaaggcgtgcgatgcccaggagcgagcagccctctgaagctgggcgcgtgaaatcctctggcgggatttttggatacgtgcgagaatccagtggtaaacaagagaaagagggcctggcatcacctggtgagggggagaaaacaccacagaccaaggaaggtgtggtggctgctttggggggcggtgaggaaactgggcttactgcaggtgcgccggtttctgcagagaaggcaatagcgggtgatgccgctgtggttgagggaactggaggtgcgactgaagcttgttctgataagctgggttcttgtgcaaattcagagaaatcggcgagtggtcctcggcatgtggaggctgtangaggtgcgacagaatc

SEQ ID NO: 7696 - DNA, 355 bp, Triticum aestivum
  Clone ID: LIB104-029-Q1-E1-H6
aggcccagtattccgtcacataacatagaatgtcctgcaccggatgtatggaaggaatcgggcgtgtgttaactgatctaatgttacaccgatttcatcatctcctcgatgacgagaagattgttccgaacagaactcatctattatcagtgttccgttgtcagtgtgtagtttactctgcatcggaactttgttttactcaacgaatgcatactgctatcataaatgtgtcaatgttgatcgtagcatgtcatacctgtctgactgatacaatgatcaagtagtccatgaatgataactcctgtgtcatctcagtttcaatcatcttgagagccccatggaattttctgcgtcg

SEQ ID NO: 7697 - DNA, 312 bp, Triticum aestivum
  Clone ID: LIB104-029-Q1-E1-H7
ttcccggttcgacagggaagaggaagatgaagaagaggaagaagaggaagaagaggaagaggaagaagatgaagaagaagaagaggaagaagaggaagaggaagaagaggaagaggaagaagatgaagaagaggaagaggaagaagaagaagacgaggaagagaaagaagaggaagaggacgaagatgaagaagaataggaagaagaaggaggagaaggagaagaaggagaagttggaggagatggagaagattggaggagaatgagaatatcgaggagaaggataagaaggatgagaaggagaagaatgac

SEQ ID NO: 7698 - DNA, 438 bp, Triticum aestivum
  Clone ID: LIB104-029-Q1-E1-H8
gggtcgacaggacctttagatttactagaatttaaaaaccaggtatctcaatgtttgcagccgagtgaccgtggcatggtgtttgacattcattcccattttttgcatgggacctaacatgcaaccaaggacacatatttgattttattcaaccaacttatatgcattagagcatgtgcatgtatttcaaatttgaattatgcacataaatgcattgaaaacacagttaatgcataaaaatgtccaaacgaaccccgaaaaatcccaaaaattgacacaacactcctgttgttctatgttagcacgagaaattttttgaaagcaataagagccatggatatcatttcgtccccaaatgtgggacgtttccctacagaaccatcacacttgttgtgagaagctctgctttgtgagaagcatatccccaaacctgcctca

SEQ ID NO: 7699 - DNA, 408 bp, Triticum aestivum
  Clone ID: LIB104-029-Q1-E1-H9
cggtctacaattaccgggtcgacggggatcgccaagccgagcggaggccggagagggagaaggaagatgatactcgccgtgctcttcgccaactccgagggcaacatcctcatcgagaggttccatggcgtccccgcggaggagcggctgcactggcgctccttcctcgtcaagctcggcgccgagaacctcaagggcgccaagtccgaggagctcctcgtcgcctcccacaagtcggtctccattgtgtataccatgatcggggacgtctgcctgtacattgttggcaaggatgaatatgatgagcttgctttgttggaggtgatcttcgctgttacgtcggcggttaaggatgtgtgtgcgaaaccacctaccgagcgcctcttcctcgacaagtatgggaagatt

SEQ ID NO: 7700 - DNA, 390 bp, Triticum aestivum
  Clone ID: LIB104-030-Q1-E1-A12
gttaaagtttgtgattcccgtagcatgcacgtatggtgaaccgttatgtgatgaagtcggagcatgatttatttattgattgtcttccttatgagtggcggtcggggacgagtgatggtcttttcctaccaatctattcccctaggagcatgcgtgttatactttgctttgataacttctagatttttgcaataagtatatgagttctttatgactaatgttgagtccatggattatatgcacttttccccatccttccagcattgctagccactctaatagcgcgcacttttttgccggtaacatacacctaccatatagcttcctcaaaacaggcaccatacctacgtatcatggcattcccatagccattccgagatatattgccat

SEQ ID NO: 7701 - DNA, 393 bp, Triticum aestivum
  Clone ID: LIB104-030-Q1-E1-A3
acgggccacacgagagggagacctaccagcaagagaggtttcgttcagttctgctatgagccaatcaagcaaatcatagccacctgcatgaatgatcagaaggataagttgtggcctatgttgaagaagcttggagtgaccatgaagaatgatgagaaggacttgatgggcaaggctctcatgaagcgtgtgatgcaaacttggctgcctgccagtcgtgctctgcttgagatgatgatatttcacctcccctctccttcaaaggcccagaggtaccgtgtggagaacttatacgaaggcccccttgatgacatatatgcaaatgctatcagaaactgtgaccctgatggtcctcttatgctgtacgtctccaagatgattccagcatctgac

SEQ ID NO: 7702 - DNA, 434 bp, Triticum aestivum
  unsure at all n locations
  Clone ID: LIB104-030-Q1-E1-A5
tcacgggtcgacggagaggcagatgctgctgttacgttgtactgttagctctgacgttaattaatccgttaggccgcgtaggtgtccagcaaaacacggcatcaatcgctttttaatacgctttaatcggtcgtcgtacagaacatacatatgcatgcgtggacgcccattgtgcacgtccacatcccccgaaagatgcagagttgcagacgaagagaacttgaagaagaaagtgattttgatcgactgttgttggtttgaccaagatgaacttacacctggccatggcgcagaggccggatcgcaggcctaactctcaagagctctgatgtgaggtgaaattgaactgaactcaactccattgtgctcattcatcaggccagtcagtcagagagtcngcgtcaacgtaccctagctagctgtccctagccacc

SEQ ID NO: 7703 - DNA, 443 bp, Triticum aestivum
  Clone ID: LIB104-030-Q1-E1-B2
attcaagggtcgacgggtgcgtgtgagagtgtcggattccgaaacggataatggagaaatcggatgcaagttttgaaaaacatgaagatgaaatgcacatgatgacatgtcaaagagcaacatgcaagcgaatgacatggtaatgatggtgaataactggaagacacctggcgcatcggactcggggcgtcacaactctcctccactaacaaaagatcttgtccagagatcttaggaacgagatggaagtgaaagagggtgaggtaaaacaagagctgaagagagaagaagaacaaagtcgagaacactcgagttgaaaagaggaatgatgaatatgatgagaatcaaagctcaaggattaaaatatactctgaaaccactcctgttagaacaagatataaaaggaataagaatgaaagaactgtgataacatctcggttgga

SEQ ID NO: 7704 - DNA, 386 bp, Triticum aestivum
  Clone ID: LIB104-030-Q1-E1-B5
actcacgggtcgacgggaggttcaagggagagaagcgacagagttagaagttgtaaatatgcattgttgtatcgcgacctgaatgaaataaacgaaataatgctcttgttcaatcgtcaaaaaaaaaaaaagaaaaaaaaaaaaaaaaaaaaaaaaaaaaaaaaaaaaaaaaaaaaaaaaaaaaaaaaaaaaaaaaaaaaaaaaaaaaaaaaaaaaaaaaaaaaggggcggcccaaaaggttcaaatctaattaacccttaaaggaaagttaaaaccccttcaaaagtgtaacaaaatttaatttaatgggccttcttttaaaaagttcttaacgggaaaaacctggggttaaccaaattaaacccctttaaaaaaaacccccttt

SEQ ID NO: 7705 - DNA, 435 bp, Triticum aestivum
  Clone ID: LIB104-030-Q1-E1-B6
actcgcgggccgatgggttgcgcaatagtgactcatcttaatggctttaaagaaagcgctgctagggagacaacccggaagttttagagagtcatttatttctgttgtgtgctttcatattgtttaaaaacaaaaaaataaagaggggaacctaaaacttttcaaaagggaaagtgaaagtgagaaagacaagcattgttgaagtgggagctagctttgaactttgttcatggtcacgtaaactttgtgaatcttgattacagaaacttttcatcaaaaaaaattatccccttgtacaattccattgtattataaaaataatgtgctaaggtttgcctttaggatgtttacaatgcttgttggtttgtacggtgcaggacagaaactttggctgtagtgcgcgattttaagttttatatggaacgtcaaatggtt

SEQ ID NO: 7706 - DNA, 447 bp, Triticum aestivum
  unsure at all n locations
  Clone ID: LIB104-030-Q1-E1-C1
attcaagggtcgacgggaaaacaaaatacggacatagaagcatcatgttgattattataatagcaacaaaattaaaaataaaacttttatcataggacttatatcatatacttctcatgaataattaatagttcatcacacaattgaagtataaagcaaaaactctattaaaaaccaacaaactatgttctcagtcaactttgcaactacaattcatcatgttttcaggaagggtcgcatatcggagcctttaggcaagtccacatactcaaccatcatatagtcttctatgattgctaacactcaccgcgtacacatgagcaaaacatttcaaccggacacatagaaagattggggcttatagtttcgcctcccagcgtattcacctcaagggtgatgtcaacanttattattcatgctatctatattcaactggacatatgtgcc

SEQ ID NO: 7707 - DNA, 412 bp, Triticum aestivum
  unsure at all n locations
  Clone ID: LIB104-030-Q1-E1-C2
attcaagggtcgacggggtctgcaaactttgaatacttctgtaactccaaaaattctgataaattacgaaaacctgggaaatttgtatatcaaacttttgttaaaaaattcatatcaaaagcacgtttctgagatttttttaaaattgttttaccgagcgcaaaagtttttgtttttcagcaagatcaaatcaactatcaccgtaagccatcccaacggtcttacttggttcaaacacaaattaaaacaccaaaacacaattactactgttggcaatctangaacngtggtcncaacacctgcctgcctgcggcccgcggcgtggctcctccggcggccctgtacgacccatcttcaccagcaaacattcaagaccctcgcgaggggccaagcctcacgaggcaaacgtcgc

SEQ ID NO: 7708 - DNA, 437 bp, Triticum aestivum
  Clone ID: LIB104-030-Q1-E1-C5
ctcccgggccgacgggccactgaagatgaagacagcggaggcggatatcgccgggttcctgtcggagcaggacaatagcggatacttccggtacgtcgcgccgtgcaccttctacggctcgcccctcccaaaagaggaaaagggacaggagaagaagaagaagaagccgcctcagttcatgctggtgttcatgtgcgtcccggtgtctccagggaaaagcagggtgatctgggcgttcccgaggaacgtcggcgtctggctcgacaaggtcataccgcggtggtactaccacatcggccagaacgccatcctggactcagacatctacctcctccacatcgaggagcgcaacttcgccgcggcgggcatcgaaaactggcagaaagccgtgtaggtgcccacgtcgtcggacaccatggtgattgccttcaggaact

SEQ ID NO: 7709 - DNA, 237 bp, Triticum aestivum
  Clone ID: LIB104-030-Q1-E1-C6
agggaaccctatagtgatgtcctatgaggtataaacatagagaagttggaatacagtaggttgaacaccaatataaataaagaatgagttcattacagtaccttaaagtggtgggttatgttcttactcaaacggagcttacgaaatattctgttcaagttttgttgtgtgtagttttcatgtcatttgggtagagaattgatgtaattcattttaaagaatggattgagcctagcc

SEQ ID NO: 7710 - DNA, 285 bp, Triticum aestivum
  Clone ID: LIB104-030-Q1-E1-C8
actcgcgggccgacgggcatccataggatgaggcggagaaagggaggggagagccatcatgtgcaggacacgagcacgtttcttctaggtattcccctgtcctttattcgaagcaagtcaaattaggtaataataacactgcaaatcttgaaaaaaaaaaaaaaaaaaaaaaaaaaaaaaaaaaaaaaaaacgtaaataaaaaaaaataaaaaaaaaaaaattaaaaaaaaaaaaaaaaacaatgaaaaaaaaaaaaaataaaaagagatgtcacgatagctacc

SEQ ID NO: 7711 - DNA, 455 bp, Triticum aestivum
  Clone ID: LIB104-030-Q1-E1-D1
gtaggcgtctagaattcaagggtcgacgggccacttctggattgcataccaaagatggcaatacctagatctattcgtgtttttatgcctagctaggggcgttattcgatagcgcttgttgggaggcaaccctattttatttttgttatttacttttggctcatgtttagtaataaataattcatatagcctctggttagatgtggttttaagttttaattagtgtttgtgccaagtagaacctttgggaagacttgggtgaaagttaatgcgatcttgctgtaaaaaacagaaactttgcgctcacgagattagatgtaattttttttatagaagagtgattttaagttgattatttttgcaaaagattcatagtaaaattcctcatctccaccaatttattttataatttttggagttacataagtattcgagagttacagattcctacagac

SEQ ID NO: 7712 - DNA, 380 bp, Triticum aestivum
  Clone ID: LIB104-030-Q1-E1-D10
ccgggtcgacgggatggggaatggggcagcagcgggcggcgacggcggtcgcggtaacgctagccgccactcctagagggaggagaaaacgagagaggcgaatgaggagacgaggacaggaataggatctatggttcgatgcattttcacctcttttgtctattcctatacgacacagtaaaaatccaggtggcatagcccatcggccgctctttacgcgtgccttattgttatggatttttatctcatatgtaaagttatatgctacactccaatgagacaacaattttatggtctttcaggtattatttaacatgtgacttggatcagtcttatttcatactatcagtttacgggctacagaatgaagcaattaaaga

SEQ ID NO: 7713 - DNA, 435 bp, Triticum aestivum
  Clone ID: LIB104-030-Q1-E1-D5
caggtctaggactcgcgggtcgacgggctcccctagaatgacgtcgataaaatttcaagaagtatcaagcatctaagattggggatgccccggtaggcatcccacctttcttcttcaacaactatcggttagtatcggttgagcctaagtttttgcttcttcacatgagttgtgctatccttgcaatgtagttttatttagctttgcttgctgtttgaataaagtatcaagatcagaaattattaaatgagagagagtcttcgcatagttgcataattatttagctactcattgatcctcacttatatctttcagagtagtttgtcatttgctctagtgcatcacttatatcttttagagcatggtggtagttttattttgaagaaatagatgaactctcatatttcacttagattattttgagagtcgttaata

SEQ ID NO: 7714 - DNA, 400 bp, Triticum aestivum
  Clone ID: LIB104-030-Q1-E1-D8
tcgcgggtcgacgggacggtgtagattgtgtcggtcaagtctgaagactcgctggacatggtgctgctgccgggcaaggaagcattgctcatgcccgaggaatgtagcaagacatcttccagcgccggctctgggcgtgggatgacgtcctgggggacctcccaccgctgatgatcggcgtcggtgatgcgcacgtggagctggttgtccgtctctaggctgcccccggtcatatcaaaattaatacaatgagcatacgagttgtgtgcattatgctggttgtaatggggagtatcatatactagtatcatgcatatgatactagtgtgtgatactaccttcgcaatgcatagtatcataagttagtatttttgactgccttagtaattgccatgcatga

SEQ ID NO: 7715 - DNA, 361 bp, Triticum aestivum
  Clone ID: LIB104-030-Q1-E1-E12
tcagcagcgcgccgacatctgctctcttgtacatggatggatggaagcgttggcccagcctgttgtcttcttgcccgcgtgttgtctctgtgttgtatcataactcgaatcaattcgttggttgtacctgagaggccattcctttcattgcctaggaatgattttaagttggtgcattttggatgcaaaaaaaaaaaaaaaaaaaaaaaaaaaaaaaaaaaaaaaaaaaaaaaaaaaaaaaaaaaaaaaaaaaaaaaaaaaaaaaaaaaaaaaaaaaaaaaaaaaaaaaaaaaaaaaaaaaaaaaaaaaaaaaaaaaaaaaaaaaaaaaaaaaaaaaaaaaaaaaaaaaaaacaacaaaaa

SEQ ID NO: 7716 - DNA, 420 bp, Triticum aestivum
  Clone ID: LIB104-030-Q1-E1-E5
ggtctacaactcgcgggtcgacggggaccacaaagaacacaccgaaaccttttgcggaagctgcaccggcatatacaatgcaagcgagttctggatcggctgcgacatgtgcgagcggtggttccacggcaaatgcgtgcggataaccccggccaaagcggatcacataaagcactacaggtgccctgaatgcagcagctccaagaaaatgaggcagtaggccgccgcctgcaagtctgcttcagccgtctctgacccatctgatcaaactacaccatgtttcttttctgcccaaggtcgcggctagcggatgtggattcctctagaaactgtgctccctcccatgtggtagtctcctagccgtaggtgctgtgaaagactgatacatagctcatactctcgtagcattatacatgtttc

SEQ ID NO: 7717 - DNA, 380 bp, Triticum aestivum
  Clone ID: LIB104-030-Q1-E1-F12
cccgggccgacgggtatcacaggaatgtgcttttgcgttgattctttttgctgctgttcaatagataaattgtccaggacttcctattttggtaggatttttagagttccagaagtttgcgttagttacagattgctacagacttttctgtttttgacagattctgtttttcgtgtgttgtttgcttattccaatgcatctatggctagtaaaatagtttataaactataaggaagttggaatacagtaggtttaacaccaaaataaataaagaatgagttcattgcagtaccttatgtggtggttttgttttctttcactaacggagcttataagatttcctgttgagttttatgttatgatgttttcaagttttgggt

SEQ ID NO: 7718 - DNA, 443 bp, Triticum aestivum
  Clone ID: LIB104-030-Q1-E1-F4
aattctagggtcgacgggccattcttcagtacaaattccatctctgttgtagcatgttttataactgaatcaccattcttctatataaggcatgcaaggggaagacgactatgttagaatctgaagggttacaaatcaggtctttgcaaaagatccaaactccaggagataataaaccaactccatttttcatagatactgctccagcacagagaaacccaactcccactgataataagcagatttcaatggccaaagaactagtccgctccagtccagcaaaagaatgtcaactccattctaagaagcgtgtgcgtatcctcgcatcatgaaattttataccattcttatcatattttctacatgtttcttacccgtctctcttttagaaaataaggttaaacgatacaagacttcctccattgggatcgtattcgaggaaa

SEQ ID NO: 7719 - DNA, 433 bp, Triticum aestivum
  Clone ID: LIB104-030-Q1-E1-F7
tcgcgggtcgacgggtgtccctacactgcatcccactatagccaccaaaaaccaatcgggaccctgttccggcaccctgccggaggggggatccctcaccggtggccatcttcatcatcccggcgctctccatgacgaggagggagtagttcaccctcggggctgagggtatgtaccagtagctacgtgtttgatctctctctcgtgttcttgaggtggtacgatcttgatgtattgcgagctttgctattatagttggatcttatgatgtttctccccctctactctcttgtaatggattgagttttacctttgaagttatcttatcggattgagtcttttaaggatttgagaacacttgatgtatgtcttgccgtgcttatctgtggtgccaatgggatatcacatgattcacgtgatatatgttttggtg

SEQ ID NO: 7720 - DNA, 385 bp, Triticum aestivum
  Clone ID: LIB104-030-Q1-E1-F9
attcccgggccgacgtcatgccgcaagaggtcgagagcgtctcccgggagccggaacaggaggagacatccgcggccactttgagagacgatgatggggaatcggacggaaaaaaaggcactgatgtgaaggaggccgcaataagggcagaggaaaagggaggggaggataagctgaccgtcgaggaagagaagaaggacggcgaagaacaagaaccagccgtcgctccggtcgagtcatcgtctagttgaaattgagatgtgagatcgtgcatgccaactcggatgtattggtgcgtgtatgaaccactgaatgtacagtttgctctcttcctttttctttttcagccaaaaggatccttccccaatgtaaaaagctttgcgtt

SEQ ID NO: 7721 - DNA, 390 bp, Triticum aestivum
  Clone ID: LIB104-030-Q1-E1-G10
gggtcgacggggaggaatagccatccagggtcaagcccctggcaaaatcgtaagtgtccggatacccaaataacttatggcgctcctctattattcggtattttctgacgccgaattcaatcatgcagtctgcccaaggctcagcttggcgattcgtcgagcggctccttggattcgtcggatgtgaatagtgcttcacttccgacggcttcctccctgctccctgcggacgacgccgaggtggagtcccaaaagggactaaaccaggaggaggttgttctggaggtgccgcaaggcatcctcctggactccaggcccaaagggggtaaagccccagtgggatctaagtccggccctgggccggacactgctacagaaccatcaacggtt

SEQ ID NO: 7722 - DNA, 404 bp, Triticum aestivum
  Clone ID: LIB104-030-Q1-E1-G11
tcccgggtcgacgggggcggcttctctgtgacttgtcacgtggcggatgtgaccggaaatggggagaaatccttggtcggcctgctgctggcccagatagcagtgacgcttcccgtcgtctccatcatgatgtgatacgtctccaacgtatctataatttttgattgctccatgctatattatctactattttggacattattgggctttattatccacttttatattatttttgggactaacctattaacaggaggcccagcccagaattgctatttttttgcctgttttacggtttcgaagaaaagaaatatcaaacggagtccaaacggaatgaaaccttcgggaacgtgattttctcaacgaataagacccgggagacttggaacctacgttaagaaaga

SEQ ID NO: 7723 - DNA, 352 bp, Triticum aestivum
  Clone ID: LIB104-030-Q1-E1-G12
tggcagttgccgcgtcgacggaggagtacgtccaggactacgccgccgccacgatcaacatcggcaggatggaggtgctcaccggcggcaactgggagatcaggatattctgcaccgcgtacgttgactaatggagccggcggttggtcgatgtgagttggtgcgcgtgcctccatcgatcgtcatgtggacggggtcacgacggccggtgtgcccgccagccgcatcgcacttgcattattctatgggtggttagagaattgacaccgtcacaccgccacgcagcgagtcttccggtgtatgtaaaaaaaagtcgtctctttgttcttgaccgagtgcccattgagatttg

SEQ ID NO: 7724 - DNA, 391 bp, Triticum aestivum
  Clone ID: LIB104-030-Q1-E1-H11
gtccgggtcgacggggatccaaatatgttagtattgttgagaggacttgcactagtgaaagtatgaaccctaggccttatttccacgcattgcaataccgtttacgctcacttttattattagttaccttgctgtttttataatttcagattacaaatacctttatccactatccatataccacttgttttaccatctcttcgccgaactagtgcatctatacaatttaccattgtatcgggtgtgttggggacacaagagactctttgttatttggttgcagggttgcttgagagagaccatcttcatcctacgcctcctacggattgataaaccttaggtcatccacttgagggaaatttgctactgccctacaaacctctgcaattgg

SEQ ID NO: 7725 - DNA, 384 bp, Triticum aestivum
  Clone ID: LIB104-030-Q1-E1-H12
acatgatcaccggcttcggcttctacgagccctactggctcatcgacttcgccaacgtgtgcatcgtggtgcacctcgtcggcgcctaccaggtgtactgccagcccatctacgccgccgtggagagctgggcggcggggcggtggccaaactcggagttcgtcgtccggcagtaccaccccttctcgggcaagttcagcctcaacatgttccggctggtgtggaggacggcgttcgtgatcgtgagcacggtgctggccatctcgctgccattcttcaacgacatcctcggcctgctcggcgcgctcggcttctggccgctcaccgtctacttccccgtggagatgtacatctcgcagagcaagatgaagaagtactccagga

SEQ ID NO: 7726 - DNA, 445 bp, Triticum aestivum
  Clone ID: LIB104-030-Q1-E1-H2
attccaaggtcgacgggcaagttcaggggctatgcgctctttgtgtacaagacacctgagggggcgcaggcctcactagtggactcaactaaggtaatcgatgggcaacagctcttgtgcaagctagccatcgaggggaagaaggggaagcagcaaccacaacaatctgggcctgccgggcaacagcaaccatagatgctccagggtggcccgccggacatgacgggttctgggcttgggctaggtggagcgcagatgggtgggcaatatggtggccctgggaatggtatgccatcgttcggcgcatttggtggtcccaacccatatgcgaacatgccatcgtccatgagtggcggtggtggagctggtttgggctcaatgggaaatcagatgcattcccggaatgggttctgctggggctggtgcatttggcaccggcgggctg

SEQ ID NO: 7727 - DNA, 368 bp, Triticum aestivum
  Clone ID: LIB104-030-Q1-E1-H4
tcgacgggctatgggaagagttcaccttttgaggatttgacgacagaaaatctaaggttcttgtcgtcgaagcaggctttatctgatttggctgttttccgccagtattatcaggaaacattaaatgccaagtataatcgctcaggagtagacaattcttggtttgtgtttggagggtcgtactctggagctctcagtgcttggttcagattgaaatttcctcacttaacatgtggaagtcttgcaagttcaggggttgttcttgctgtttacaactttactgacttcgacaaacagattggggagtcagctggtccagaatgcaaagaagcacttcaagaagtaacaaggcttgttgatggacaact

SEQ ID NO: 7728 - DNA, 410 bp, Triticum aestivum
  unsure at all n locations
  Clone ID: LIB104-031-Q1-E1-A10
attcccgggccgacggggaagagtatcgtcagcacgacggcgtggtgacgatcttgatgaactacagcagcagggcttcgcctaaactccgctacagtattatcgaggaatatggtggcagggggcaccgcacacggctaaggaatcgatcacgaggatcaacttgtgtcaacttgtgtgtttagaggtgcccctgcctccgtatataaaggagtagagggggggaggctggccggccatagagggaggcgcaggagagtcctactccctctgggagtaggattcctccccccaatcctagtccaactaggattcctcggaggggaagggagagaggggggccggccaccttctcctagtcctaataggactangggaaggggaagangcgcagctacctttgggctgcc

SEQ ID NO: 7729 - DNA, 413 bp, Triticum aestivum
  Clone ID: LIB104-031-Q1-E1-A11
gcccgggccgacgggcggggctgtcttgaagagttgtatgcagcttcgccatacacctccttcatcaacaacgacatcctggacatctgtgcgagacagaaaaaattaagacttgaaaatacgttaaagcacaccacgcacgtggaatgaaaaaaaggaaaaaaaagtgaaacacagaccacatacaatttcgacacgttctccatggagtcggttccttgaaaggttacgccctgtatatctccacgagtcatggatatccagggactcacgatacttgttcatagtgtacagtgtgaaatgattccgattccaatatggtagcatgatctatcaacatgtgaattagacgacaaagaagagcataagaagttagctacaagatgtctcagcagtttagaagacaacactac

SEQ ID NO: 7730 - DNA, 384 bp, Triticum aestivum
  Clone ID: LIB104-031-Q1-E1-A2
tcgagggacgcgtttcaaaagctgaggctttattacgagacaaagaggaagaaaatgtgatgctgaagcaacaattggaacagtatgagaataaatggtcagaatatgagactaagatgaaagttatggaagaggcatggaagaaacagctctcttctctgcagttgagtcttgtggctgctaagaagagcctagctgctgatgacatggtcacccgagcagctcggactgataccactccaacacatgctcaatacgactctgaagatacaatgtccacagggacccataccccagaagggacagagttgaaataccaaaaccacaaccctgaacctagagtggtgacaggaaactcagataggcgaataaatgctgtgaatc

SEQ ID NO: 7731 - DNA, 415 bp, Triticum aestivum
  unsure at all n locations
  Clone ID: LIB104-031-Q1-E1-A4
cggtcgagatagccgggtcgaccggggcggataccaaaaccatcgcactatataataataaggaataataaaagtaagaaaattagacaagtatcaatcgcaagtaagaatttttttcctttcagaaagaagataagaacaagaggctcaccacggtggtgccggcaacgaaatcggcgcgggcgatcgacggcggtgaagacggggacgagacgtgacggaccgctaaacctagaaaaatctcggcgaaaatggagctcggaggtcgagtttcgagagaagaaatattaactactgtggctcggacatttcatcgaacacctcatgtgcatangaggtgagctagagcacccaaatgccctcccctcgccggccagcaaaaaacagagcagtgtggagtgctttgctcgctgac

SEQ ID NO: 7732 - DNA, 418 bp, Triticum aestivum
  Clone ID: LIB104-031-Q1-E1-A6
attcgcgggtcgacgggtcttccttatgagtggcggtcggggacgagcgatggtttttttcctaccaatctatccccctaggagcatgcgcgtagtactttgtttcgatgactaatagatttttgcaataagtatgtgagttctctatgactaatgttgagtccatggattatacgcactctcacccttccatcattgctagcctcttcggtaccgtgcattgccctttctcacattgagagttggtgcaaacttcgccggtgcatccaaacctcgtgatatgatacgctctgtcacacataagcctcattatatcttcctcaaaacagccaccatacctacctatcatggcatttccatagccattccgagatatattgccatgcaacttccatcatcatcatatacatgacttgag

SEQ ID NO: 7733 - DNA, 354 bp, Triticum aestivum
  Clone ID: LIB104-031-Q1-E1-A7
gggtcgacgggaggcgacagtggaacttttggcgatcgtggtggctttgtccctgctcggtcgccgcatttgacgtgcagtacatcatcgacgagtgatgtcaccgttgatctgtatgaataatttgtgtcaaataaaaggggggaagtgactagtgaagtaaaacgacctgtaacttgttaccctattcttttgcaaatgttcatgctaatcatgccataaacacgaactgttcgcttcatcaccaaaaaaaaaaaaaaaaaaaaaaaaaaaaaaaaaaaaaaaaaaaaaaaaaaacaaaaagataaaaagataaaataaacatgcatcaaaaatcaaaaaacttctaaagtg

SEQ ID NO: 7734 - DNA, 399 bp, Triticum aestivum
  Clone ID: LIB104-031-Q1-E1-A8
attcgcgggtcgacactgttatggaaaaatgtggtactagggtggtggcttgggatcatgagggtctcttccaagcagcaaggtgtgctaagtatgatggtattacagatccacttaacatagaaatcctagcctgccgagatggaatgcttctagcgaaagatttcttagggctaccaatctgttatcactgagacagattgttctgatgccaagtacctgtgggaaatgaggaaggaaggacggtcactaggtgtgcgtattcttaaggaaatgcaagacaggttatctaatttttagggttttgagcttcggtatattagccgtatttgaaataatgtagcacattgttgtgctaaagaagctctaggcataggtccagttcttttggccgattct

SEQ ID NO: 7735 - DNA, 381 bp, Triticum aestivum
  Clone ID: LIB104-031-Q1-E1-B1
catacaaggaaaacaaattggggctatttcaagcatgtcgaaatacaacgtgctctcagatgaagccttttagcctacccgaaccccctccattaaacatgatgtatttttgaacatctttgaaatgaaaccaacttttgaaagtatgtgggaacgcccatggtaagcatcgatgtcaagtttggatgatctccgacaccgtatgcaagttgcgacacacccgaccatttatcggtattttttgattgaaaaaactccagaaaatgaaaaacttgtcaagaacccaagaaagtaggcatggtgccctgagttgatcatgcaataccatgaaaaagaattagggtcatttgaggaatgtcagaaaaaaaagtgctctcaaac

SEQ ID NO: 7736 - DNA, 411 bp, Triticum aestivum
  Clone ID: LIB104-031-Q1-E1-B2
ggtcgacgggccatacaaagtcatcaagaactggaactacaccggcctcgtcgatgccatccacaacggcgagggcaactgctggaccgccaaggtgacatgcgaggaggagctgatggcggccattgcgacggcgaccgaggagaagaaggactgcctgtgcttcatcgaggtggtggcgcacaaggacgacaccagcaaggagctcctcgagtggggatccagggtctctgccgccaactctaggccacccaacccgcagtagacattatactagatctcgattttgatgatttgagcgaggcattttcgatttactagaatccagcgtacgtttgattactactcccttcgttcctaaatacggatgtatgtagacatgtttctagacattttgaatgactactacat

SEQ ID NO: 7737 - DNA, 414 bp, Triticum aestivum
  Clone ID: LIB104-031-Q1-E1-B3
gcatcctaatgactcaccgacaatctgtaacctgtattcatctattgcgtgatgcattctattggatacaagtcatggtgttctgcagtctgcatttcttcacttagtctggatttcgagagctgttgcatgcatgtgtcctcgtcagtaggctcatcttttacagtctgtgggctgtgaactggtaactaggaggttcaatgtcagtcaattttattgacactgctatttaatttttgagagggatatcattgttcagcatgaattttgctgtagtcgcacttgtatttcctagagcatgtaacagtcgtcacggccgcagatattgaaatcgatgaagctacattctatgtaaatacatatatatatatatatatttttcccgtaaaaaaaatacccttgaaggaaaattta

SEQ ID NO: 7738 - DNA, 407 bp, Triticum aestivum
  Clone ID: LIB104-031-Q1-E1-B7
acgggattagctagacagtgtcgtggaacatgtgcctcatgtcctatggggatttgcgcgaatgtttcagacttaagcacacgtgaagtttgctcaaatactcgtagtagaaatctgttgggtgaaacaactgatggtggtttattagtaatatttcagcacgattctggccctgtagggtcacattcttttgaatctgcacgtcacttgtttattgttactactgctggataggctgttgccagcctgcttcgtcaaccgaaggatcggcataatggcagtcttctctttgatatccagtggagactagttcatagtgatttccgatttattttggagatttcccctgaaggtaacatggggtttgagagtgcacatttcaatcgaagccatgaaatgactcaatt

SEQ ID NO: 7739 - DNA, 408 bp, Triticum aestivum
  Clone ID: LIB104-031-Q1-E1-B9
gacggggatacaaatgaagcagattaacaattggttcatcaaccaacgcaaaaggaactggcacagcagcaacacagcttcctctagcgaaaagaccaagaagaaaagaaacgttacaggtaatgacggcacggagcaatcgtggtagaccgggtcccagatgaaacaaactagatgtaaactatacttttatcatgaagattgctgcagtatattctctccctctcctctttctggtggggcaactagatacgaagacgacccgttcacaagcaagttcaaaggcaaagaaggtatcaataatagttgaccaaaggtggtagcgactccggatgtacagtgtgagtgttttgctgatgtaatttgtgtaagcctgtgttgtataaccgaggaacggaaaggggcaat

SEQ ID NO: 7740 - DNA, 426 bp, Triticum aestivum
  Clone ID: LIB104-031-Q1-E1-C1
cggtccagactaccgggtcgaccgggggacatatttgaagcagtcggattaaacctgtatctctttccctatggtgttttgcccactggccctgaacgaggcataattgaggttgtcccaaatactcggagtagaaatcaaatgggtgaaacaactgatggtggtttattagaaatatttcagcaagattatggccctgtagggtcaccttcttttgaagctgcacgtcaaatgtttattgttagtagtgctggatatgctgttgccagcctgcttcttcaaccgaaggatcggcataatggcaatcttctctttgatagccaggggagactagttcatattgatttcggatttattttggagatttcccctggaggtaacatggggtttgagagtgcacatttcaagctaagccatgagatgact

SEQ ID NO: 7741 - DNA, 392 bp, Triticum aestivum
  Clone ID: LIB104-031-Q1-E1-C3
gggtcgaccgggagctacatccggtacatggggtcgctcaccacgccgccctgcacggagaaggtgatgtggaacattctgggcaagggcagggagctgagccaggagcagttacaactcatcaccgcgccgctgcctcaccaggacaacaggccgccgcagccgctcaatggccgccaagtcgccttctacaacccgccaaacaccatcatctccatccaatccctagtactccctccctaaactaatataaaagcttacatttgtttacagagggagtacaataagcaagacatagtacatactccctcctcggttccacaatataagaacgtttttgacactatacatgtcaaaatgagtaaacatctaccagaaaaaaaatcaggagg

SEQ ID NO: 7742 - DNA, 390 bp, Triticum aestivum
  Clone ID: LIB104-031-Q1-E1-C4
ggattgaagtctaatccccatgacttcttgttttcctttgccgaagccttagcatactgaaagttgcgcttgaagagattgtcgtcacgacaccagagcaatgatgatgggtcggcttcttcaggctgtggtcaacggaccatgcaaggatagaattcttgcgcaatggcttcatctttgttcttggggggaaggcctcgatagagaatatcaccccaagggctcttgataggatttttctctgcgtacgcctgggtcacacacttgtacttgtatcactgttcagcccaatagcgtcgaatccattggattcgagtcttgcgctaattgtaatcctcttcaggatctgttttgtacatttctgcaagatcatcatgtagatcctttgaa

SEQ ID NO: 7743 - DNA, 398 bp, Triticum aestivum
  Clone ID: LIB104-031-Q1-E1-C5
attctcgggtcgacgggggtggcaagagggcgtccggcttcaatagcttgtctcagcctgagagaaggaacagcagcaagaagctccagcgccagctttccttgcactattaattttagttgcctaattcgttcatcattcatccatcattttgctgctgaagtgtattaattcttggttctgcttactagattccaccttatgcgctagctgttggcgcaagtacgtcaatcacctcaaaatttagtagatttgaaatatcgttttcattagccattagtctctatgttgaaagagtttctgttgaagaaatagctagctaggcctacaacttttcccatgtctttttgtttgatgtctggatgttattggaaaccttaagtttctgttgaagaaat

SEQ ID NO: 7744 - DNA, 369 bp, Triticum aestivum
  Clone ID: LIB104-031-Q1-E1-C6
atccttctacagtaacgtgccttagaccagagcatatacgaagacccttaggagtctcgatctcgagcttgccttgaacgacgactttaaattacatcattcattcagcattcagctatcaatgcgctgctcaagtgtccaagctcttagatcagcctaccacattcgacttaacgctctacctgttggcacagctacgtcaaacaccacaaaatttaggtcacttgacatgacgtttctcagcatacactagtcgtcaagtcttgtgagtttcgcattattcagcatccaaccatgcatacaactttactcaagtcttgctgtatgatgtatccacttcatgatcagccttgtctatttcttcaagat

SEQ ID NO: 7745 - DNA, 325 bp, Triticum aestivum
  Clone ID: LIB104-031-Q1-E1-C7
acgggatgatccacgaggccgatgtcgatggcgacggccagatcaactacgaggagttcgttaaggtcatgatggccaagtgatcccgccgatgtcccggtggacggtggtattattattttaccggggaggaggaaattgtgctatgcatattagtagtaaggaatgcggctctcgtttccttgtctttgccccaaaccagaagaagcgtactattagacgtagttgctgaagagcattcatggaatcctcctcccctgctgctaccttgtctctctcccgtgtgtcattgaaacatctttctttctgtgtgaaaaaaaataac

SEQ ID NO: 7746 - DNA, 433 bp, Triticum aestivum
  Clone ID: LIB104-031-Q1-E1-C9
gcccgggccgacgggcagtagtactttacttctgccattactcatagggagtagtctcattatcctttgtgggaacttcattcaggacatgacataatgtcaatatagcctccccccaccatgtcttggataaacccgatgtatctaacatggtgttaaccaaatctgctagagtatggtttttccgtttggcaaccccgtttgactgggtgaatagggaggcgtcctctcatgaataataccatgttccacactgaataaatcaaactcattagaaaagtactctccaccacgatcagaccaaactcgtttaattttcttttcaagttggttctcaacttctgccttatagattttaaagtagtgtagatcctcatccttagtatttaacaaatacacatagcagaatctagtggaatcattaatcaacaac

SEQ ID NO: 7747 - DNA, 350 bp, Triticum aestivum
  Clone ID: LIB104-031-Q1-E1-D1
acgggatgatccacgaggccgatgtcgatggcgacggccagatcaactacgaggagttcgttaaggtcatgatggccaagtgatcccgccgatgtcccggtggacggtggtattattattttaccggggaggaggaaattgtgctatgcatattagtagtaatgaatgcggctctcgtttccatgtccttgccccaaaccagacgacgcgtactagtacacgtagttgctgaagagcattcatggaatcctcctcacctgctgctaccttgtctctctcacgtgtgtcattgaatcatcattcattctgtgtgaaatacagtgagacgccagaagacgcgcacggaacga

SEQ ID NO: 7748 - DNA, 442 bp, Triticum aestivum
  Clone ID: LIB104-031-Q1-E1-D4
cggtcgtaaaatccggggccgacggaaaataataacaaaattattagtccgggaaaaacaaacaaccaaaaaattccggtgccccataaccaccaaacctaaggcaggatccggtgataataacatctggacagacttacaaaagagaatatattgagaaatggttcattgagggatacaacacttgtcccaagacacagaaaaagctagaaaactttgcgatgattccaaatacttgcatgagggatctcatttgcaattggtgcagagagcatggtttcacaatctcagatttccttccaagcaaagattcctacagttacttgccagagcaattgcatggtcactcaatgtcaagtttgcacaatgtttcagtgcctctaattgctgggaatgccagaaattttgtgattgaccacagcagttcatctgtcgcgttttc

SEQ ID NO: 7749 - DNA, 402 bp, Triticum aestivum
  Clone ID: LIB104-031-Q1-E1-D5
aattccggtcgacggggcatgggaaccttattcggaacctatgcgggtggtttccatggcgaggagaggctgggaaagcttggctatctcgttggaagccagctaggcagctgggttgggggaagaatcggactgatggtctatgatgtcatcaacgggttgaactacatgcttgagtttgtccgtccagaggagtatcgatcatcatcttacgcaacataagagggctcagagtatgcagataactacagaagttcgccttacgtatcagaagagggctcagagtatgcacataactacagaagtcgcgaaggatatgagccaacatacagtgagacgccagaagaggcgcacggaacgacggggtgaagctgtatgtgaacaacctgcgaagcgcacaca

SEQ ID NO: 7750 - DNA, 406 bp, Triticum aestivum
  Clone ID: LIB104-031-Q1-E1-D6
attccgggtcgacgggcgggatcatgatcatgaggaatatataggataataaggtggtgtattaccaccatgcccgttgagctgatgtttgtttcagctagagaaatcgttacgcccgctcataattcctttttcgacgctctggagaataataactactggtatatcattctatatcaaagccggcttgtgaaataaatgatccgccgtcttgccttcaaaaaaaaaaaaaataaaaaaaaaaaaaaaaaaaaaaaaaaaaaaaaaaaaaaaaaaaaaaaaaaaaaaaataaaaaaaaaaaaaaggcaaaaaaaaaaaatacgggcctgcccataagggttcaaggttaatttacacttcttcgaaagttcaaacttcttctaaatggccgccaatttttaatta

SEQ ID NO: 7751 - DNA, 402 bp, Triticum aestivum
  Clone ID: LIB104-031-Q1-E1-D7
attcgcgggtcgacgggtgatccgaatgatgattgtgatatcaagattaggagggtgaatgttagagctaatcttgatatttgtattagcatgtttgagttttgcatgtagtctagtctagtgtggtgttcgtccgacgaaggcttcaggtgagcgcgccaaggaggtgagatgccaggatgccgtgtgaggcggcgagcacggcgagatgccgatggtgctgcgtgagaagcggcaagacgtatcagaggctggagccgtgatggactgcatcaaattgggtcgggtgaaccggccggtcgttctgtttgttggactagctgttcatgcgtgagttcgtttagtcctagccgagagtatcgttgctagtagttgatgcatgcatgtagttggcctggtcac

SEQ ID NO: 7752 - DNA, 398 bp, Triticum aestivum
  Clone ID: LIB104-031-Q1-E1-D9
gacgggtcatgacacacactgctaaggatgcttcaaagtcaatttcgatcctttaccgtgtgattcaagacccgtcgtccagagcatgttgaataggttcctacaagggttcaaactatctacctcgtcattcacactgggtgatcacaataacagagtaatagatactaactctgacacaggggaagctaatattcacaatggtccttctagtaatgatacaatggcacctacatctttgcacatgtacaatctccaacatacggaggaccgattctctctacatatttaaatcatgccagacctcctaatattgtcataaataaagattttgattcctgagtgtatctcttcaagcgtcatttaaatcatgtgaacaataaacttttgagaatcat

SEQ ID NO: 7753 - DNA, 380 bp, Triticum aestivum
  Clone ID: LIB104-031-Q1-E1-E1
gcagacgagatagattatgagggtgaacaagactacctcgactttttgactgctaagcaacgttcgcatgtccgccccgatgatggtactgacgccgataccgacaccgacagcgcccgcaccgatggcggcgccgataccagtggggaaggtagcatcatggaagataccggctccgatgccggtaccggtaagatgcataagatgcagaggatataacagcctgacatactacggattggaccacttgtgatcaccatcatggcacctggcatgtttcagacttgcatgtagctcgattttctagatgatcacgcgatacttctttgtgtcggatgatgatttatactagactatatgtatgtcaatcctatgattac

SEQ ID NO: 7754 - DNA, 306 bp, Triticum aestivum
  Clone ID: LIB104-031-Q1-E1-E10
gacggggagtcgaagcaggagaggatcgagaagctgccggaagtggagcgggcgttcgtccatgcggacttcgagaccacccataagccggagcacacggtccggagcaggctgccggcgaccgagccctgacgatggcaccttccgctccagcattcgccagatcttgtacagcgaaaatacacgcctgaagctgcagtgttcttgttgtttttctcttgcgctgaccccgaaaaacacagcgacagagccatctagaagatggatgtctctgtggaataatacaggattcgccatttttatggg

SEQ ID NO: 7755 - DNA, 389 bp, Triticum aestivum
  Clone ID: LIB104-031-Q1-E1-E11
gacgggaaacgtgaagcgggacggacgtctctctggaacaaagatacaatagccaaacctgagtacggtcgtatccaacagagacgtacatcataactatctacatatccatcagtatcaactaaggggtggtggaatttaacagcaacatgccagctttgactcagtggctaacatgatctagacggcacgtaactcttttgaggtggcgcacacgagtccacatattcaccatatcaatacaccactatggatccgctcccgtctccctacgataacgccatccagagcactcacgcttatcttgcgcattttacaatatccacttcaagttatctatgaactgtacatgcaacccagatgtcctttactgcggacgcggctaatcc

SEQ ID NO: 7756 - DNA, 427 bp, Triticum aestivum
  unsure at all n locations
  Clone ID: LIB104-031-Q1-E1-E12
cccgggccgacgggcctacctattatggcatttccatagacattccgagatatattgccatgcatctttccaccgttttgtttattataacacacttcatcattgtcatattgctctttgcatgatcatgtagttgacatcgtatttgtggcagggccaccttcataattttcatacatgtcgctcttgattcattgcatatcccggtacaccgccggaggcattcatatagagtcatatcttgttctagctttgagttgtaaatcaataaaagtgtgttgatcttcattattagagcattgtctcagtgaggaaaggatgatgaggactatgattcgcccacaagtcgggatgagacttcggactttacaaaanaaagagagaaaggccaaaaaaaaaaaanaaaaaaaaaaaaaaaagcggccgc

SEQ ID NO: 7757 - DNA, 435 bp, Triticum aestivum
  Clone ID: LIB104-031-Q1-E1-E3
cggtcgaaaatccgggtcgaccggcttattgatcgattcaaattcatggaaccgtatttgagaactgccgaccttttagaaccagtgcaccttatgtacaaaggaactatgagagtgctgcttgtactactccatgactttcctgaatttctgtgtgattatcacttcagtttttgtgacgtgatcccttccagttgcattcaaatgcgcaatgtcattcttagtgcttttccgcgcaacatgagacttccagacccatctactcctaacttgaagattgatctgctagctgaaatttcattacctccacgaatcatgtcagatgtcgatggtgccctcaagttaaagcatatgaaggttgatgtcgatgagtatcttaagagaccagaaggctcatcctttttgaatgatctgaagcaaaaattgctgctgcct

SEQ ID NO: 7758 - DNA, 429 bp, Triticum aestivum
  unsure at all n locations
  Clone ID: LIB104-031-Q1-E1-E4
gcaaggcaaaccagtggttccagcggatccaggaggcctactccgttttgtccgacaaggggaaaagggccatgtacgacgccgggctctttgatcccctcgacgacgacgaccaggatttctcggacttcatgcaggagatgctggtgatgatggatagcgtgaaaaacgagaagccggacacgctcgaagacctgcagaagatgctggatgacatagtcaacggcgacggcggtagccgcgccactgctggtgctggtggtagcggcggcggtggtggtggctgcggtggtcgcgttccaccggaggccaaccgcagaactcgtgtcgccccttacccgcagccttcgcgaaggtgatggacgcgccggtgctcgtgacgtgcacgcancgctgcgcttgtangagagagatcagagcaagaagaga

SEQ ID NO: 7759 - DNA, 430 bp, Triticum aestivum
  Clone ID: LIB104-031-Q1-E1-E5
attcgcgggtcgacttcatggaggagaagttaaagcattacccagccgccgtcaacgatgaagggatgtatgaccattccaaggaagtggccgaggccatgctcggggaagctaatgtgaaggtggctccccggagcatgggtggtgaggacttcgctttctacgcgcagagagcggcgggtgcattcttcttcatcggcgtaggtaacgagaccgccatggatagtgtgcatccggtgcactccccgcatttcgtcctcgatgagggtgttcttcctattggagccgcgtttcacaccgcggttgccattgagtacctgaaccgctcctggaaactacaggagcatgagtgaaggtccgttcttggattatggagtgaaaatcctctgatgtccgtatagtattagatatccagaatcgtcttcatttg

SEQ ID NO: 7760 - DNA, 345 bp, Triticum aestivum
  Clone ID: LIB104-031-Q1-E1-F11
gacgggaaattggatactgcagttcccttacggactgctcgtgtctgggtgctcttggtggagactgcgtcgtctatctgctaacttcatctccgttcaatggccgtccacttacagtcgtgggacagccaaggacagtcacctgacgctggtggctcaccatctgacaccgccgccggtcctgacgtgcccggacaagaacttgatccaccaggttgtgttctccaactacttgaacccgctggggatctgctgcaactacaccgttggcaaatgccacacgcccaaggccatcgagattgtgcacaacgtgtgcgtgacgaatacgagctgcgtgctggccgt

SEQ ID NO: 7761 - DNA, 443 bp, Triticum aestivum
  Clone ID: LIB104-031-Q1-E1-F2
gaccggcaagagtagtaacaacactgaatttccccattgcccctgaggccctgaagacgcaaccttgtgctggacggacaaaatgtttcatgtaaaattcgacggctttcgcttctgctgtcgatggtatggcgaaagaaaagtaggcatactgtatacaccagctgttgtgttacactcactggtcctagggggcatgtgatgtaaattatttctagcgtatgttctcgaaaggaaaaaagggaaattccggtgtcctctagacgggcattgagatgcatatgctgtactgtgaccgagagtagccgattcagagagataccattttgtgatgaaaaataacttgcgtaaatcggtggatttgtggatgtaaaaaaaaaacacgaaaattgcaaaggcgcgtaagtgcatatccacccactgtccagatacacagtttaaaa

SEQ ID NO: 7762 - DNA, 316 bp, Triticum aestivum
  Clone ID: LIB104-031-Q1-E1-F3
aacacaactggatcctcctgtaacggaggagattatgatacctattagggccggttcttcatcaactggtacgccaaggtgctgctggatcatgcggaccgcatgctgatgctagccaggttggcctttgaaggctcagctattgctgtcaaagtgtcaggcatatactggtggtacaaaactgccagccatgctgctgatctgactgcttggttctacaacccatgtaaccgcgacggttacgctccaattgcccaagtactgaaaaaccatggtgcggctttgaacttcacctgcgttgaactgcgcaccatgg

SEQ ID NO: 7763 - DNA, 402 bp, Triticum aestivum
  Clone ID: LIB104-031-Q1-E1-F4
cggtccgtggcgctcaacagcgaaggccttgagggtctagtaccacgggcaaagctgttattatcacttggtggtacttttttcctggcatttggtcctctgattattgtcacggtttctctatttgctggtctttatctgtattttgggcaaagctttgtacacgacgggagcaagaaaccagtcgcgccaccaccatacattgacccatatgagctactggaagatgataggatctcccggccctcccttgatgtgttctgaatctccacgacaaaaggatagtatttgtagatagctcaataattttcttgttttactatatatgtacctgtaaatgcaatagctgtagactgttattatccggaaattggcaatggctcgtaggttcatattcaccca

SEQ ID NO: 7764 - DNA, 444 bp, Triticum aestivum
  unsure at all n locations
  Clone ID: LIB104-031-Q1-E1-F6
attcgcgggtcgacgggcagagagagcggtccgtggcgctcaacagcgaaggccttgagggtctagtaccacgggcaaagctgttattatcacttggtggtacttttttcctggcatttggtcctctgattattgtcacggtttctctatttgctggtctttatctgtattttgggcaaagctttgtacacgacgggagcaagaaaccagtcgcgccaccaccatacattgacccatatgagctactggaagatgataggatctcccggccctcccttgatgtgttctgaatctccacgacaaaaggatagtatttgtagatagctcaataattttcttgttttactagatatgtacctgtaaatgcaatagctgtagactgttattatccggaaattggcaatggctcgtaggtgcatatgcnaccattgtctanatacacat

SEQ ID NO: 7765 - DNA, 394 bp, Triticum aestivum
  Clone ID: LIB104-031-Q1-E1-F8
cgggaatagctagcggatcttgttactcttgggtgtttgagcatcctatacggttgaggtcaccgcgaagccatagtccattgtggtgaagcgtcatggtgtcgttgggagcctccaattgagttgtggagattgccccaacctcgtttgtaaaggttcggtcgccgcctccaagggcaccaatagtggaatcacggcatctcgcattgtgtgagggcgtgaggagattacggtggccgtagtggcttcttggggagcattgtgcctcgacaccgctccaacggagacgtacttcatctcagagggaatgaacttcggaaacacatcctcatctccaacgcctccactcttggttgtcacgtgcctttagttgtggcagcgtagttgtttcaga

SEQ ID NO: 7766 - DNA, 396 bp, Triticum aestivum
  unsure at all n locations
  Clone ID: LIB104-031-Q1-E1-G1
cgggtcgacgcggatgttggtaaagcatttacctaagttatggaaaattcataattcatcagttattttagataatactaaannacaggatagagtaagatacaaaaagtggtaaaagaaaagtgggatttcatcaagattgattacaatgaagtcccctaaatttcggaaatcaaagagatttggttgtgggaattggtcaatgagttaagtaataataataagaactagatcatccaaacccattgaatgaaaaaatgaaattcgattttcaaggaaatttttggataagagattaataaacaattgaattgaaaaaaaaaaacttcattctaatttggataatttccttttcaataagaccctctttttggagtgaacgatcgaatattcccc

SEQ ID NO: 7767 - DNA, 351 bp, Triticum aestivum
  Clone ID: LIB104-031-Q1-E1-G10
gacggggagcacaagatcgcggaggagcacacgaagaccgacggggagcacatcaatgacggcgtaccacaaggagggcatgatggacaatcatcaaggaccagatcagcggcgacggccatcgccacggcacgatggacggcgaccaccacgagaatagtgacaacactacacactacgacacgatgcacggctagggccacaaggacgaccacggccactgcagcagcatcagcgacagcgacagcgactgagccatctccggccgcgctccggcagcatcgtgcagtgtacgctagatcgatgaacgcttgcgagatgtgtgccattcatatatgttgcatggtttgg

SEQ ID NO: 7768 - DNA, 379 bp, Triticum aestivum
  Clone ID: LIB104-031-Q1-E1-G12
gacggggatggcaggttaaaatcaaaaaaaaaaaaaaaaaaaaaaaaaaaaaaaaacaaaaagataaaaaaaaaaaataaacaaaaaaacaaaaaacacaaaacggtcaaaagcgatacctaaacttcaattcaacggccgttcgtcttccagggtctcccctgggttcaacttcgtcgtccgtcgttttaatcgccttgcaccgggtcaccctttccctagcccgcctctgccccgctgcgccctttccccttttcctccgctgacgtctcctccgactgggcccccacctggtcccccttccgatccgttttttaccctgccgggggtgtggaacactccccgtaccctgtccgtttccccccaccggctcccccgc

SEQ ID NO: 7769 - DNA, 427 bp, Triticum aestivum
  Clone ID: LIB104-031-Q1-E1-G2
gtcctatggttaacaagttcgatgtcagcgtctgccgcatccaactgtcgttttaaatgggcaaactcgctagtccggctagccaccggagcttccatcacctgcacatagaggcagtatggctattacctgggaatacgatcctctgttcatcgtcgtttccgacgacaactagagtctcaggggctactatctacacagggcacacctagcatgtgcaggactatcatacattattttacgtacctcaaagcctgtcagtagactcataaaagcttcatgcaatctgctttcgacggacgagattctctccatcaccttattcatcagcacacggtgttcatctgagatggccgctcgccccaccaactccctcagaacatccgttcacacaccagacggtgccggactcttttttccgctctct

SEQ ID NO: 7770 - DNA, 408 bp, Triticum aestivum
  Clone ID: LIB104-031-Q1-E1-G4
aaaattgatttgatccccgtaggttaaccggttggttgtaaggcggccataccaattgccataattgtggcaattttccggtagttgattggcttgatcttttggtttgcttggaggtggaactgttcgatcgatggcagagtttcgtccgctattctaaattgctaaatgcacacaggtggggcctgagttttatgtggacggttagatgcctaatcttggggttgtagtttgtcttgcttttcccgtgtacgtttatttgggtgggcatagtgaagaatatgtttgattgtttaatagtataagtagagaagtagagatttgtctttcacctggagattcgatgtagctcggtctgagcatgagtgatagcagtcttgtatcttatgtttaccatgcaaattttac

SEQ ID NO: 7771 - DNA, 260 bp, Triticum aestivum
  Clone ID: LIB104-031-Q1-E1-G6
gatagccagcatctcatcgaaacatcaggacacctttgcctctatcaagtggtttcagattttcaggttgctcggtgagattttacagtttttcgtatctttagatcgagtctattcttcgtacctatagtccacgaaaaagcgaacggctacggttagttcatcctagccgaaccaatctgagcctttgcataagcctttctgaatatgcggttgcaccatcgtgtcgagttgctcgtcctagcgtcgagtcctttcaa

SEQ ID NO: 7772 - DNA, 451 bp, Triticum aestivum
  unsure at all n locations
  Clone ID: LIB104-031-Q1-E1-G8
gacgggtgggtacattgtgacgtgcaatcgcgcgcgcggggtagcgtgtcccctaccacggatcctaggtacgggccgacagtccgacaccgacctacgacgtgcgatccaggaggaccacgtcggccgatcaatcaatcagacgaattactaccacggtaataaggggtgcagtgggtggtgattaactcgcaccgccatgggggctctgtcggtgaccgtgtgatggtccaccatagcttccagaagatttcaagaaacgtctcgttctagctactaatttgacacgtatagatctttcgtgtatcagcaccgatccgtaaatggggcttccagaacacatcgatccattttgtcgctgccaaatgcgggcaagtctcacgtccagaagcaggaaaagtagagcgattaagaaagcagtcggaagcanatggcaattggcaagcttaca

SEQ ID NO: 7773 - DNA, 402 bp, Triticum aestivum
  Clone ID: LIB104-031-Q1-E1-H1
caagaaaggattcagtcaaatatatcatcagtatcaatcactatatgacaccacacaacagatatgctgctgtcagcagtgctctctaaatagacactgcaattatcttatacatcattactgttgtcagcaatgctctctaaatagacactgcaattatcatgtacatcattgctgctgcaataaaccactaagaattattcaatatctagcctagcgccttcgttatcatcaaccgagggttgaggcggagttacaaaatctgaatgagaaaccaagggattgtccaagtcagcgacatctttgttatcttcagagctgttagaagcagctgagatggcgtcacccgattctgaatgtgttctgtccacatatgcttcgggtaaggagctctcggccaca

SEQ ID NO: 7774 - DNA, 396 bp, Triticum aestivum
  Clone ID: LIB104-031-Q1-E1-H12
cgggaagcgacagtggaacttttggcgatcgtggtggctttgtccctgctcggtcgccgcatttgacgtgcagtacatcatcgacgagtgatgtcaccgttgactgtatgaataatttgtgtcaaataaaacgggggaagtgactactgaactaaaacgacctgtaacttgttaccctattcttttgcaaatgttcatgctaatcatgccataaacacgaactgttcgcttcaaaaaaaaaaaaaaaaaaaaaaataaaaaaaaaaaaaaaaaaaaaaaaaaaagaaaaaaaaaaaaaaaaaaaaaaaaaaaaaaaaggggacccccaaaagttacaaacttaaaaaaaacggggccccccaaaaggttccaccctaaattccccctcaatgcaaa

SEQ ID NO: 7775 - DNA, 413 bp, Triticum aestivum
  Clone ID: LIB104-031-Q1-E1-H3
gggtcgaccgggggagaaatttagttggatttgttccccggattccagcgcaaagatgccgcgcattcccatgatcagattccccaagaggcatctcaaagtcccatccccagcagcggcgcagcctgcagaccagcacgcgaccctcatgtcccgattgggagctaaagtagaggcaccatcttctggagagaaaaagaattaccgctttagatcagatgtgccttccgcaccttctcataatgctgttggagggccagcttcacagcttcccaagcgcaaaccactatctgaggaagagattgaagctatcatgcaaggcggtgtcttctgatattgcttccggccagtggcaccttttgtggagcaccaataagccctacgccgcgctgcattcgtaaccgttttgcaca

SEQ ID NO: 7776 - DNA, 449 bp, Triticum aestivum
  unsure at all n locations
  Clone ID: LIB104-031-Q1-E1-H4
cgggatactgtagactgcaacattagcctgtataaatcatccaaacccctcaagttcatctanggatgcangtgaccaaagtatttgggacctcatctggaaagcaaaggtgcctgagaaaattagaatttttgggtggagagtagccacaaataccctggccacaaaaagcaacaaatttaagaggacgctcgaggtggactcgacttgtgacatttgtggcaatggcgtggaggatgaacatcatgcggtgatcaattgctcgaacagcagggcccttcgcgttgccatgaggaaggagtggtctcttccatcagagaaatccttcagacatacaggtanggactggctacaggcgcttttggacaaggaaacagaggaagttagagcaaaaatcttaatgctgctgtggagatgttggcacttgagagaagatatcctaagacaca

SEQ ID NO: 7777 - DNA, 440 bp, Triticum aestivum
  Clone ID: LIB104-031-Q1-E1-H5
attccggtcgacggggttagacattgtaaatatgcattgttgtatcgcgacctgaatgaatgaaataaacgaaataacgctcttgttcaaaaaaaaaaaaaaaaaaaaaaaaaaaaaaaaaaaaaaaaaaaaaaaaaaaaaaaaaaaaaaaaaaaaaaaaaaaaaaaaaaaaaaaaaaaaaaaaaaaaaaaaaaaaaaaaaaaaaaaaaaaaaaaaaaaaaaaaaaaaaaaaaaaaaaaaaacggaacacccaaaagataaaataaaataaacaccaacgataacaaaaataaaacaaaaaatcacctcaaaaacaaaaaaaaatagaccaataataaaaaaccaacaatcaagaaaaaaacctagtaaatcgaaaataaaccttatcacaaacaaaacacctattcaaaaactctgaaaaacaaaaaaggcaatcaaaa

SEQ ID NO: 7778 - DNA, 443 bp, Triticum aestivum
  Clone ID: LIB104-031-Q1-E1-H6
gcaacaagaaatactaagccaaatgagaaaaagattccacggatgagatattttatgatcacagatattttttaccacaaccataacattaaagttgtctaacatgtaatcaagacttcaagatatagctccctttgcaccaagagttcaacaaaacagtttgcaggcaggaaaagttaaagctctagaaaaaatcctttatgaagttcccatgactaaaaagattcctcaatgaagttccattagcaccaagttataacttttcactggctaattaaggcatgaatgatacccacgactacaaaaattacgacctctcaaacaacaacagaacagaaactttatatgtccattggcctagagcaaggaagaacctctatgaagttggtggaaaaggtaatgtaagttgggtggaacatagatcacatacctgaatctaatac

SEQ ID NO: 7779 - DNA, 416 bp, Triticum aestivum
  Clone ID: LIB104-031-Q1-E1-H7
cgggcatcactagagtgagtcgtataagagaaaaagattccacggatgagatattttatgatcacagatattttttaccacaaccataacattaaagttgtctaacatgtaatcaagacttcaagatatagctccctttgcaccaagagttcaacaaaacagtttgcaggcaggaaaagttaaagctctagaaaaaatcctttatgaagttcccatgactaaaaagattcctcaatgaagttccattagcaccaagttataacttttcactggctaattaaggcatgaatgatacccacgactacaaaaattacgacctctcaaacaacaacagaacagaaactttatatgtccattggcctagagcaaggaagaacctctatgaagttggtggaaaaggtaatgtaagttggtgg

SEQ ID NO: 7780 - DNA, 433 bp, Triticum aestivum
  unsure at all n locations
  Clone ID: LIB104-031-Q1-E1-H8
gtttcataattttcaactttcatccatgttaaaaatgcttaaacttgttgtttgctttatatttgcataaatgccatgttaaaatgatttatttcataactaattaaccataactccgaattaaataaactatatatgtaaattgtctagaaaaatgcatagattaacatggtgcactttgttttattgcttaacaacattaaaatatgctttagggagaacagtagctaattaaaatatggacatgaggattttctggaattgttgtttgttgttccggcctcatttaaacttacctagatatgttgttttattatgcttcacctcttgccatgtttaacaacatttaatattgtttggtagcttggacgagattaaactaaatatgtcaatgtggtgtnttgtcaatatgcaacttgttgcatattgagct

SEQ ID NO: 7781 - DNA, 420 bp, Triticum aestivum
  Clone ID: LIB104-031-Q1-E1-H9
ggtcgacttccaacaaaacgaaatccaccatctcatcgaaagacgggacacctttgcctctatcaagtggtatcagatttccaggttgctcggtgagattttagagtttttcgtagtttagatcgagtctgttcttcatacctacagtccacgaaaaagccacaaaataaaattagggttagttcatcatatccgaaccaatctgagccgttgcataatctttttagggttttgctttgttgaatttgcggttgcatcgtcgtgtctagttgctggtcttagagtctagtcttttagagtttcgagttctggtcagaagttgtcacgccgccgccgcaccatcatcatcgcccctgccatcgaccaccaccgctccgaaactgtatccatataccatcacgaatccgtgtccatatatca

SEQ ID NO: 7782 - DNA, 340 bp, Triticum aestivum
  Clone ID: LIB104-032-Q1-E1-A10
gggtcgacgcggagatgtgaatgaagggaggtcggtctgagttgcagaaaagcatgggactacgcaaccgatgacgaacatttgcactgagagtgaagagcgagggccacgccccttgcgaagatgccgccgtgcatgtaatctacaaagaagcctacatgatcaacgcgctagtcacgcatgcaatacagaatgtctatttgaacgcttacaggttcacacatgcagctttagttggcacggaaggtagagacagtatccaggtaggtacggtggactcagattgaagaactttggcgttcattgcagtgcctgcggacacagtagacgcgcttattac

SEQ ID NO: 7783 - DNA, 391 bp, Triticum aestivum
  Clone ID: LIB104-032-Q1-E1-A11
gacgggggacacaaacacacttcatcccccaaaacggaattgcaaaccccctccaatttgaaaataccattgacaacagcaaactttataaacccttgggtgtcaaaaccaaccggccttggtgtgtcaaaggttaccgggacaccttaaggaacattgccggatcaacccacatgctgcatcaactatttgtacctatacaaatattcatcatgctcaatctccctactccttgtttagtactgcctccgttccataatatagtgcatatagatttttttgagaagttaaacatcacaaactttggccaagtttgtgggggaaaaatatttacatctagaatatcaaacatgtatcattagatccatcgtaagatgtagttccatatttt

SEQ ID NO: 7784 - DNA, 421 bp, Triticum aestivum
  Clone ID: LIB104-032-Q1-E1-A2
gggtcgaggcgtccttggagttgatgggttcggtaaagtttaccagggagagatcgatgggggcacaactaaggtggctatcaagcgtggcaaccccttgtctgagcagggcatacatgagttccagactgaaattgaaatgctgtcaaagctccgccaccgccatcttgtgtcgctgattggttactgcgaggacaagaatgagatgatcctggtctatgaccacatggcccatggaactctgcgtgagcacctatacaagacccagaatgcgccgcttagctggaggcagcgtttggagatctgcattggtgcagcccgtgggctgcactaccttcacaccggtgcaaagcacaccattatccaccgtgatgtgaagaccacagacatcctcctggatgagaaatgggtcgccaaggtt

SEQ ID NO: 7785 - DNA, 278 bp, Triticum aestivum
  Clone ID: LIB104-032-Q1-E1-A3
tttctcttccgatcgttctgttgcataattatatattgcttatgtattgtctgtgaattggtactaacgtttcgtttggctagtgcatagcgatgccgacgtatgtcgtgtacaagggtaaggttcccggagtctacgatgactgggaggagtgtctgagacaggttcaccgattcagcggtaacagttacaaagggtacaccactagggccgaggccgaatctagatacacccgctatctagcgggaaaagggatggacctttgggggaaacgggtg

SEQ ID NO: 7786 - DNA, 425 bp, Triticum aestivum
  Clone ID: LIB104-032-Q1-E1-A4
gggtcgacgggccttcctgcggtgtcgctcccataatctcatctcctgccctcagtatgatatgagctccgacgagggaaggacatgtcggtccgcctgagcgccctttaaatccgccgcgtccctctctttggctttaatcaggggctgattcccccgatgagtcatgtaggcaataattctgcagggccaaagcggcggcaggcatccacaccgcaccgcactacctggccctaccctacgtacatactccagcacaccgacgtactacgatgtaccctacactacacagtacacacaccctaaagacggagatcccccatgatcatcatcattagtgctgccatgatcctctttaatctgccgtacgcaccagatataatactgtctccctcccagtcccagttcaagcactcgttctgctg

SEQ ID NO: 7787 - DNA, 411 bp, Triticum aestivum
  Clone ID: LIB104-032-Q1-E1-A5
cccgggtcgacggggaagaagagagagaaggaacaaaagaaagctgcaaagaaggccatgaagatgaaaaaggaggaagagaagaggatggccacactgaattcctgcaaggatgaagacagctcatgctcatcggagtccagcaacagtgagtgtgaaggggaagtcgtcggaatgagccgctgtgccaccatttctgcgcctcgaacaccacctgcaagcacagttttccccatcatagtgcctcaaattccagactccgttgcactggatgctcagatcttttccgggtctgcaaatgcaatgcagtgcactgccaccagccttgcggttgtcgaaaaaccagtgctgaacagaatcaatgtctgcatgggcggcaagtgcaagaaggcgggctcgctcgctgtcctg

SEQ ID NO: 7788 - DNA, 426 bp, Triticum aestivum
  Clone ID: LIB104-032-Q1-E1-A7
cccgggtcgacggggcaatgaagaggaagggtggtcggccgaggcgaatgaagacgaagcggcgtcctccaacgataacgacatcgaggagatcaacgtggaggatgaccgtagtgtcgccatcgcggctgcctccgtgggcgtagtcaccaatgaggatgacagtatcatcgcggccgatgctccggcgatagagaacgaccagatcgacacgttcgtgcctgctccggcagccaatgccaacgaggatgccggtgccaccttcctggctgccccggtggccggtgatgatggcagtgcctccttcgttgctgcgccggcggccatggaggacgaacttgtatccatctcgtccgctccgttggccgaggacattgatggtatcatcatgggggctgctccggtcgctgacgatggtgatgttgc

SEQ ID NO: 7789 - DNA, 398 bp, Triticum aestivum
  Clone ID: LIB104-032-Q1-E1-A9
cggggaagcggacgttcgatgctgagacgccgcggcggcgggagtcggcacgcagcaacgaagcggtcgaggaagcgcggatcaagctgctggagctgcggcaggtgaacaaggtgaaggcgctcgtcggcgccttcgagaccgtcatggacgacaaccaaagccccgccaccgcccgcaagccgcggctcaacctccacgcctgaactacgagtacattccaccagcatgaagctcgatcgcgtgcacctcctcctttatcccggctactctttaatcacccatcaacccaatttgtcgtcgtcgcacacttatctataattacggtatcgcttatattttgcaaggaggaagatgatggaagggttatcatgatgtaataataataatgatcatgg

SEQ ID NO: 7790 - DNA, 427 bp, Triticum aestivum
  Clone ID: LIB104-032-Q1-E1-B1
ggggttgcttaatttgatgaatctatggctagtaaaatagtttataaaccatagagaagttggaatacagtagatttaacaccaatacaaataaagaatgagttaattacagtaccttgaagtggtgttttgttttctttcgctaacggagctcacgagattttctgttaagttttgtgttggaaattttcaagttttgggtaaagattcgatggactatggaataaggagtggcaagagcctaagcttggggattcccaaggcacaccaaggtaatattaaaggacaaccaagagcctaagcttggggatgccccggatggcatcccctctttcgtcttcgttcatcggtaactttacttggagctaatattttattcaccacatgatatgtgttttgctttgaccttgttttaatttaattaacc

SEQ ID NO: 7791 - DNA, 360 bp, Triticum aestivum
  unsure at all n locations
  Clone ID: LIB104-032-Q1-E1-B11
aggccgcatcatatagtaagactcactagggaagcctccgaataagttcaaaaggtttggaaaactgcaaagatttgttaaaaaggaaaaggcctcctgtttctcaaactgttcaactcgacaacttgaaaaacctaaacctacatggtgtatctctaacagaataccccttcaaaaaggttttaaacggtttccccttaaatggggaaaaccctctcaaaaggaagccaatatctttagatatgcacccatggatactctctgtacagagaacgctggaaaattacgtcgcatccgangccacaacaaataagcttgccagagatgccttctgttcctggcttcgcgcttacaccgccc

SEQ ID NO: 7792 - DNA, 388 bp, Triticum aestivum
  Clone ID: LIB104-032-Q1-E1-B3
ggccgatccggaaaatgaatcgctatcaaggaaggcgaacctgacctccgttccagcaggagatcgtgcacctggcggcggtgctaaacggcgaccaccagctcaacagcctgcaggagaggatcagggagaggatgaacgtgagggaaggcacctcctacatgaggagcgccgtgcggcgcttcttccatgccggcatgtcggccaagaggatgggcctcgccgacgacgagcagatcgtcaagattacgccctccctttacaccagcaatgacctcctcccctgcagattaaagatgatagtccgtagagagcaaccatgcatacatacataggatgaacattgatgttggaattaccacaatttctagtaccacagatacaatac

SEQ ID NO: 7793 - DNA, 108 bp, Triticum aestivum
  Clone ID: LIB104-032-Q1-E1-B4
gggtcgacggcacgggggcaagggggcaccccaaagcacaatagttgtttcttagccgtctgcggtgccccctccacgtttactcctccggtcatattgtcgtagtgc

SEQ ID NO: 7794 - DNA, 417 bp, Triticum aestivum
  Clone ID: LIB104-032-Q1-E1-B6
cccgggtcgacgggcagcacgaccgtgcgcaaaggtttctttttagattaagaccatgtgtaaaccttctttactgtctcttgttgctttacaccctccggatactcaacacaaccgagagggatgctggcgttgttggcatttcgccacgtcagacgaatgcacatacctggaaattcagggttcattaacaagggcgttactcagcccggtatatgttgtaaagtccgaataccttatggagtgttcggcgtcgcgagtttggccttatatgcatcagctccgaatcatgtctttggtcaatagttgggttttcccggctcccgtgttttgctaccttacgttccgctctatcggctatggtggcaccgggggaactgctgcgattgtgccctggttcatctggatgagcacctc

SEQ ID NO: 7795 - DNA, 324 bp, Triticum aestivum
  Clone ID: LIB104-032-Q1-E1-B7
gatgggcaacacgatagtgagtcatggtatctttctaaattaataccatgtgtaaaccttctttactgtctcatggtgccttacaccctccggatactcaacacagccgagagggatgctggcgttgttggcatttcgccacgtcagacgaatgcacatacctgtaaattcagggttcattaacaagggcgttactcagcccggtatatgttgtaaagtccgaataccttacggagtgttcggcgtcacgagtttggccttatatgcatcagctccgaatcatgtcgttggtcaatacttaggttttcacggctctcgtgtctt

SEQ ID NO: 7796 - DNA, 448 bp, Triticum aestivum
  unsure at all n locations
  Clone ID: LIB104-032-Q1-E1-C1
gggtcgacggggatgaggatggtgacttcgcggagggcgaagaggaaatctcggaaggagaggagtatgacaaccccaaggccagtgacgccaagaagaaacaaataggcgagggtgaggagaatggcgaggatgatgaggaagaacaagaggagcaagagggtggaggaggtgacgacgatgatgatgacgacgacaacgacgatgacaatgaggacgacgacgatgatgacgatgatgtcgctgctgaagacgatggagatggagtagaagaggaggatgatgacgatgaggaggangaggacgatgaggacttgctccagcccccgaagaagaggaagaagtgaagcccttcgaagcggctgctttagttcacatgcgacgagatgtgcctgtccttcactgtgttctggaaactttccttagagttaaaaatgcccccacacga

SEQ ID NO: 7797 - DNA, 310 bp, Triticum aestivum
  Clone ID: LIB104-032-Q1-E1-C11
tcttactagatagtgaagtggctgaagcccggtgggcatattttcatcacggagtcctgcttccaccattctggggattccaagatgaaagtgaacccgacgcactaccgggagccaaggttttacaccaaggtgtttaaggaatgccactcctatgaccaagatgggaattcctttgagctttctctggtaacttccaagtgcattggagcttatgtgaagagcaagaagaaccagaatcagatatgttggctatgggagaacgtcaagtgcacagaagacaaatgccttcagagattcctggacaatg

SEQ ID NO: 7798 - DNA, 405 bp, Triticum aestivum
  Clone ID: LIB104-032-Q1-E1-C6
gacgggggaagctacgctggtgcgccgcgccctcgaggccgtgcgccggacgccgcgctggcagaagaggctcgtcgtcctcaccgcaggagctggcactttaagctatgcttgccaggataaccgtgttcttcaaatcagtgatggaacggggggcaagaaaaaagtggttatacttggaactggttgggcaggtgcaagtttcttgagaaatatcgacacttctttgtatgatgtccatgtggtatcacctcgcaactattttatgttcactcctctgttgccgagtgtgacatgtggcacggttgaagcacgcagtattgtggagccaattcgcaatattgtgagaaagagacgtggtgcattcagattctgggaagcagagtgctacaagattgatccaac

SEQ ID NO: 7799 - DNA, 435 bp, Triticum aestivum
  Clone ID: LIB104-032-Q1-E1-C7
ccgggtcgacgggggatagcatacggtgatagttgtgttgatcctgctgaaaatcagaaacttttgcgcccagtaaattagttttgataattcacagaaacgtggttttgatctgattcattttgctctggatcggtacacaaattgctcaggttttcctaatttggtaggatttttggagttacagaagtattcgagagttacaaattactacagactattctgtttttgacatattctgttttctatgtgttgtttgcttattttgatgaatccgtgagtagtatcggagggtatgaaccatagagaagttggaatacagtagatattacaccaatatagaaaataaatgagttcacaacagtaccaaaagtggtgatttattttcttatactaacggagcttacgagttttctattgagttttgtgttgtga

SEQ ID NO: 7800 - DNA, 417 bp, Triticum aestivum
  Clone ID: LIB104-032-Q1-E1-C9
ggtcgaggcgattcttcatgatgatctctttgcgtttcaattcttatcttttatgtgagcatcattgaaatcatcatgcctagctaggggcgttaaacgttagcgcttgttgggaggcaacccaattttatttttgttccttgctttttgttcctgtttagtaataaataaatcatctagcctctggttagatgtggttttatgttttaattagtgtttgtgccaagtaagacctacaggatcttcttggatgataattatttgatcttgctgaaaaagacagaaactttctgctcacgtaaacaattgttaaaaatcaccagaaagcgataaaatactgattccaattgcagtagatcaataatcaaattatataggtcttcctattttggcagatttttctgagttccagaagtt

SEQ ID NO: 7801 - DNA, 409 bp, Triticum aestivum
  unsure at all n locations
  Clone ID: LIB104-032-Q1-E1-D10
gggtcgacgcggatgcggaggaagacgatgatggcgaaccacgaggacagcccgcacatccgagagaaggtgctctacgccgtcaagcgctactggaccgccgacagcgacaagagctcccaagagaagaaggcaacttcttctgaggtgtgaaatataatggtgagtgagatgagctgagctgatgcactgcaactcaggagatcagcgtgtgtttatttcaacttcttgtgagtttctctcgagtgtagcagtgagatcagcacgtgtattcctttttgattacgtcgtgtaggatgaacacttcttttccattttttcgagatgagatggtaggaaatattcgacacaaagatctacgtaccattttctgcncgtcacagattcaagaatgttgttatggcactcg

SEQ ID NO: 7802 - DNA, 436 bp, Triticum aestivum
  Clone ID: LIB104-032-Q1-E1-D11
gggtcgacgggtatgacgatcattaaacggataatgtttgcaaaagcaaatgaaatactccctcagagggagtagcatacctttccgatcttcgaaagtttatctgaaactgcaaccagtggaatgctgccatcagtccatttagcatcatgaagtgtgatttttggagctgctgcttttgccttccctgcagtagactctgtcttctttcgtggttttggtttctcatcaacggaggagtcatcgttactggatagctctgttgtagcatcactaagtcgccgtgacattgcttcctgaagttacagaagaagatcagttgtcattgctcaggtacatgaatttcaattgcatgtaaacctaagcaattcagaataaagcagtgcatataataagatatgcccattgcacaatgctcctgattcacacatacact

SEQ ID NO: 7803 - DNA, 401 bp, Triticum aestivum
  Clone ID: LIB104-032-Q1-E1-D12
gacggggatgagaattgtgtggtggctcacggaactttatgtagttaaattataagtcaatccattccataatgtagtgtatatagatttctacaatagttaaactttgcaaattttgacaatgcttcgtgataaaaatatttatatttaaaataccaaatgcatatacttggatacatcatgagttaactattcatattatatatgtttgacattgtacatatagatagtttgttcataaacttagtcaaagtttgttaagcttaacttttcaaaaaaatccttttttgcggtaaattatggaacggagggagtgcttagaattgcaatttgaagttacacataaggtgttttccttggagttcacgattagaacgtaaaacagaatgtatcaccctgtc

SEQ ID NO: 7804 - DNA, 438 bp, Triticum aestivum
  Clone ID: LIB104-032-Q1-E1-D2
gggtcgacgggtcgtgcgatggtgtcggcaaacgatggcctcagtgggtggacgccgacacatgcagctggtgcacgatggtgacttcatggagctcatgttccaagcaaccctctccttgttggctcaggaggttcgcgatcgagcttgggctgctgatacctcttcctcgccgcccaacaggaatagcatgagatgagcagccaatccctcattcctagctttcataccaagattctgtgcaccggttcccctacggttgaagatggagagccattggtagtagagagggggaagggatgtagagacggaagcagcttcacttgccccgtctcccaccccattgccgatgcagcggtcgaaggagttgcggacctcgccaacaagcctgtgaccctgcatcagcgatggcttgatgtacgcactggaaacctccta

SEQ ID NO: 7805 - DNA, 447 bp, Triticum aestivum
  unsure at all n locations
  Clone ID: LIB104-032-Q1-E1-D4
gggtcgaggcgatggaccaaaaagtctaaggtaaactactcacacttcatcgaagaggctatgatgatgtagaagccctccatgatgatggccctcctccggcggagcttcggaacaggccctaagatgggatctcgtggatacagaaagttgcggcggtggaattacatttttggctccgtatctgttcgtttgggggtacgtaggtatatataggaggaagaagtatgtcggtggagctctgaggggcccacgaggcaggggggagcgccccccaccctcgtgaccgcctcttttgttccttggcgtanggtccaagtctcctggattacgttcggtgagaaaatcacgttcccgaaggttttattccgtttggactccgtttgatattctgtttcttcgaaacactgaaataggcanaaaacagcaattctgggctgggcctcc

SEQ ID NO: 7806 - DNA, 395 bp, Triticum aestivum
  Clone ID: LIB104-032-Q1-E1-D9
gatggaaaacatggtgtccaatgaggaattcaatgtggccttggatacattgaaaacatcaatgacaaccacggtagaaagcatgtttaataaattcttagaaggacttaaactacctacctcgtcgttgaaagtgggtgatcccactaacaaggtgacagatgctaactctgacaagggggaagctaatagtgagaagggtccttctactagtggtagaatggcaccgacatctttgcccatgtagaacctccaacttatggaggaccgattccctctactcatttaaatcatgccggtcctcctaagattgtgaaaaatgaggattttgattcttgggtgtatcgcttcaagcgtcatttaaatcatgtgaatactaatctttggagaatcat

SEQ ID NO: 7807 - DNA, 449 bp, Triticum aestivum
  Clone ID: LIB104-032-Q1-E1-E1
cggtcgacgggaggcggtcgcggtacacatagcgcgacgacgacgacgatgatgagaggaagccgcggtacaagaagcacgacgacgacgatgatgaccacgagaggaggccgcggtacaagaaacgtgacgacgacgacgatgatgacgatgacagaaagccacgttacaagaagcgctacgacgacgacgacgatgatgataggaagccacgttacaagaagcacgatgatgatgatgacgacgacgatgataggaagcagcgtcgcgggaacaaccgccgccgccacgatgacgatgactgattatgacatgagtttaagctgacgctaataagcatagttgcggcggctttgcatcgatgaattacgacatttcactttttttccaagcatttttcatttcgctgttcactggccacatgcttccaatcgtatgctcgagcttct

SEQ ID NO: 7808 - DNA, 312 bp, Triticum aestivum
  Clone ID: LIB104-032-Q1-E1-E12
acgcgctgatgaatatggggccgcactacatgatgaagaccgagtcacgcgtggatgtgaagacaggccgcatcgtgaatatcaccggccatcgcatcaatgccgatcatctcacagggtcctcactgcagatgtcctaccatcagcccagctacacacatgtgcatcacgtcaaccattcgctagctggcttactctacagtatgcaatcatgcatgttccgtcgatgtacttcatcaaccttaattgtcaatgggacactcactttatactgctcaagtcacgtagcagtagtgtgcgatactcacaaca

SEQ ID NO: 7809 - DNA, 453 bp, Triticum aestivum
  unsure at all n locations
  Clone ID: LIB104-032-Q1-E1-E2
gggtcgacgggagggctcaagatctgtgttcggagaggggaattcttgaggtcggaatcggaacaagcgggcgcgctcgggatcggggttaccatacaatttttcccaggaacctttagtgaatgtgctaatggagtcaaagggtggcaaaaagtctagcagtagtagttccctgatgtacgaagctcccctcggctacagcattgaagacgttcgacctgctggaggcgccaagaagttctctgctgcatactcgaactgcgcgaagaagccatcctgatatcgtttttggcatccccttcccgtagtttaggatttttatgcaattttattctgactcttttctcncaccaatctctctggcttgctgcttcacgataatcgaccagttctctagtctttctcnctctgttcctctctgctctgctttctgactcaaaactgcaacaatgg

SEQ ID NO: 7810 - DNA, 449 bp, Triticum aestivum
  Clone ID: LIB104-032-Q1-E1-E3
gggtcgagcgggatattacagtagaaacaacgcaaaaacaaaatatgaattggtttgcaacagttcttagagtagtgatttgctttattatactaacggatcttaccgagttctctgttgaagttttgtgtggatgaagtgttcgatgatcgagaaggtctcgatgtgagaagaaggaagagaggcaagagctcaagcttgggatgcccgaggcaccccaagtaaatattcaaggatactcaagcgtctaagcttggggatgccccggaaggcatcccctctttcttcaacaagtatcagtatgtttttggatttgtttcgttcatgcgatatgtgcaatcttggagcgtattttgcgtttagttttcatttttattttatgcaccatgacggtatgatatagtccttggttgtttatagaatgctcattgcacttcacttatatcttt

SEQ ID NO: 7811 - DNA, 440 bp, Triticum aestivum
  unsure at all n locations
  Clone ID: LIB104-032-Q1-E1-E4
tatgtcgtgtacaagggtaaggttcccggagtctacgatgactgggaggagtgtcggagacaggttcaccgattcagcggtaacagttacaaagggtacaccactanggccgaggccgaatctagatacgcccgctatctagcgggagaggggagggagcattggaggaaccggatgaagacgagtttcatcgtgatgatgctcatcgtgatgaccccagctctcttctatgtgatggtagtttagatgatcgatatcgacttgtaatgtgaagacaaactcgctactcgcggtctcgagacttgtaatataatgttctatctctgttcggtcttttcaattcggagactaatatgatgaattgtattcggagactaatatgatgaattgtattcaaagactaatcttctattgtattcgatgaatctgttgttgatgtg

SEQ ID NO: 7812 - DNA, 464 bp, Triticum aestivum
  unsure at all n locations
  Clone ID: LIB104-032-Q1-E1-E6
cccgggtcgacggggaagaatgacgaagacacagaagaagaagaaaaagaagaagaagaagaagaagaagaacaagaagaacaagaagaacaagaagaggaggaggaagaagtagacgaagaagaagaggaagaagaagaagacgacgaagaagaggaagacgaagaagaagacgaggaagaagaagatgaagaagacgaagacgaagaagacgaagaagaagaagaataagaagaagaagaagaagaagaagaagaagaagaagaagaagaagaagaagaagaagaagaagaagaagaagaagaagaagaagaagaagaagaagaggcgattgaaaagcaaacggaagaaatacagacagatgagcagaaacatgatgacagtagggctgatttcaccacagagacaatattggagccccagagcaacganattgacacaacaaataggaaagacaacgctga

SEQ ID NO: 7813 - DNA, 387 bp, Triticum aestivum
  Clone ID: LIB104-032-Q1-E1-F11
gaacgtgatcaccatcttcgaggaggaaggcgggcggccggacgccatcatgatcctgacggtgaagcgcgacaacatctgcagcttcatctcggagaccaaccccgggcacttgcggtcgtgggagaccaaggacagccagctgacgatggtggcggacgacctgaagccgcgggcggtgctgacgtgcccggagaagaagttgatccagcaggtggtgttcgccagctacgggaacccgctggggatctgcggcaactacacggtgggcaaatgccacacgcccaaggccaaggagattgtggagaaggcgtgcgtggggaagaggagctgcgtgctggccgtgtcgcacgaggtgtacggcggggacctcaactgcccgggcac

SEQ ID NO: 7814 - DNA, 383 bp, Triticum aestivum
  Clone ID: LIB104-032-Q1-E1-F12
gcgcaaagagagacgcttgattttggaacaacagctagcttcttctcaagttcctagggaggagcagataaaattgataaaggagttgcagaggaaggagactgaatacatgagacttaaaaggcatagaatttgtgtggatgactttgagctgctcaccatcattggaagaggtgcttatggggaggttcaactatgccgggataaatcctctggtaatatttatgcaatgaaaaaaactaaagaagtctgaaatggttgtcaagggtcaagtggagcatgttagatctgaaagaaacttgctggctgaagttggtagtcactgcattgtgaagctatactattctttccaagatgctgagtatctctatcttatcatggag

SEQ ID NO: 7815 - DNA, 395 bp, Triticum aestivum
  Clone ID: LIB104-032-Q1-E1-F2
cgtaatacttacgtggacgagcacctgatgtgcgacatcgagggccaccacctcgcctccgccgccatcctcggccacgacggcaccgtctgggcccagagcgccgatttcccgtcgttcaagccggcggagatggccaacatcatgaaggacttctacgagccggggaccctcgccccgaccgggctgctactcgcagacgccaagtacatggtcatccaaggtgaacctggcaccgtcatccgcggcaagaaaggcccgggaggcatcaccctgaagaagaccgggcaggctccggtggtcggcatctacgacgaccccatgacctcggggcaatgcaacctggtcgtggagacgccgggcgactacctggtacagcagggcatgtcgacgac

SEQ ID NO: 7816 - DNA, 447 bp, Triticum aestivum
  Clone ID: LIB104-032-Q1-E1-F6
attcccgggccgacgggtcactcaatctctctctctctctctctctctctctctcttttttgagggactcattccttcctcttaattctgctagtcagtggcagaaaactctttgtggaagggaaatcccatgcggctgtagccaaatagcgctattaattttccttgaaccagataagtgtggcgtgctctcagttgttgtaggagatgggatcatacggacttgtatttgtaatttgttttattttggaaggtacgtacaagtaaattgaaatcttgttcatttcttgggtgtgacaagtgctcagttgacttagatttggttaagtctaagtcggttgatatcagcatgtttctacgttatttttctatttttatgttttcctacatttttttaagtgcaggtgaaaaaattaagaatttaaatatgttttcgccttggaaaat

SEQ ID NO: 7817 - DNA, 414 bp, Triticum aestivum
  unsure at all n locations
  Clone ID: LIB104-032-Q1-E1-G10
gtcgacgccgtccttaacatgtagtctcaaaatcgtagttagattttgttacgttaaaccaggttgcttatgtcatgtgtgtcatggttgaaccagtttgattatgtcgtgtttgttagggttgaacaagtttgtttatctcatcaagtacattgttttcttatctcattatataagtttgctagcttcgtattttgtttatccatcatttcaaattcaagtagcttgcgagtggaactttgtggctgctgttcagtactagttatcaagcaactattcacacaagggtcttccatgtgtagtttggattcagcattgtatggaaaacataacgttgaaaacaatcagtacaatttgagctgcttagcagcgcttcanaagttgaagtaatttnttttagtacttcatgtactg

SEQ ID NO: 7818 - DNA, 329 bp, Triticum aestivum
  Clone ID: LIB104-032-Q1-E1-G11
gtattatcatggttgagttttgttacgttgatgcaggttgcttaggtcatgtgtgtcatggttgaaccactttgattacgtcgtgtttgttaaggttgaacaagtttgtgttatcgcatgaggtacattgttgtctgatctcattatacaagtttgctagcttcgtagtttgtttagccatcatttcagattcaggttccttgcgagtggaactttgtggctgctgttcagtactagttatcaatgcgactagtcagacagaggtcttccatgtgtagtttgggctcagcattgtatggaagacatagcgttggaaacagtcagtagag

SEQ ID NO: 7819 - DNA, 368 bp, Triticum aestivum
  Clone ID: LIB104-032-Q1-E1-G12
gtcctactaacaaggcaagagatacctcgattgccttcggaggcatcgtcacggtgtcatgtggccattgccaccctgatattgtcaaggccgtgcaggaccagaccaagttgcttcagcacaccaccaccatatacctgcatcatgccatcgtcgagtttgccgaggcgcttgcctccaagatgccaggcaatctcaaggttgtgtacttcgtcaattctgggaccgaagcgaatgaactagcaatgttgatggctcggctgtacagcgggaatctcggtatgattgcattgagaaatggataccacggtgggagtgctggaacaataggtctcacgggtttgcagacgtggaagtacccgattcct

SEQ ID NO: 7820 - DNA, 434 bp, Triticum aestivum
  Clone ID: LIB104-032-Q1-E1-G4
tggtttagcttacatcggatatgtaaatcgagcagtaaaatattagacacagttgaacttagactacctccatactcctatgattctgaggctgtttggatacgaattccacggtcagcaaaaatagctgtggaggaaaggaaactagagtttcgtggtggttcacatgctgcttcacacgcactcttgaatatattgcctctgcatatgatgtgtagtgcttctgacctgggaactgagtgcgtaaatcctcatgaaacccgtggtatgcctgaaagaattcttttatacgataaacacccaggtggtatcggcctggcaacgcaggttaaaaaactttttggggaacttctgcttgctgctttagagcttgtttcgacatgcagttgccctagtgcttctggctgtccgaattgtatccaatcattgacatg

SEQ ID NO: 7821 - DNA, 423 bp, Triticum aestivum
  Clone ID: LIB104-032-Q1-E1-G5
gcgggtcgatgggagtcccaaagtggtatagatctatgaaggataaacaaagaaaaaaattccatgaagatcattggacaaaataaactttattcttagtaatagttttgagatatgatgatgtgatatgtgagttatgttgatgagtaattgtgctctagtaagaatattggtgttaaggtttgtgattccctatgcatgcacgaaagtcaatagtcatgcagtgaaaattatgtcctacttgtggtgcattatttggtgttaattatgcttaatgcttgcttatgagattattcgtttcttggttggtcttttcccaaacttttgctaaccttcattttgcactaagtatgacctctacttgtgcttccaaaatcctttaaaccagttttgccacatgagttcactatatctacctatatg

SEQ ID NO: 7822 - DNA, 422 bp, Triticum aestivum
  Clone ID: LIB104-032-Q1-E1-G6
gacgggggagccaatgagggccactctcgacacgctgcccccacacacacacacccacccccgggccgcgatcgtcttcctcgattcaacgagagttggaagcgggatagttcttgggccaccggaagcgtcgcacgcatggcagatgaggaggtatctgacccaaaggcactcctagaggatcgtacgaaggctaagtgtgtctaccactggtatgaatatcagaaatgcgttaagagaattgaaggtgatgagaccgggcagaagcactgtactggccagtacttcgattactggaaatgcatcgacaagcatgttgctgagaagctctttgatagcttaaaatgacaaggaaattgttctctctagctacttttcactcaacagtggtaataaatagtatcacttgcacgccttattga

SEQ ID NO: 7823 - DNA, 392 bp, Triticum aestivum
  Clone ID: LIB104-032-Q1-E1-H10
tggatcagtaatactgacacacacagtactcaaaggatttataacaaagtgcaatcacacacttattacatcgaatgtctcaaaagagaacttattacaaaaatatggcttaaggccaactaaataagataactgcggaagcatcgaagataaatgagtccatcaactccaatggcatagctgagtgcacgacaacgacctagcgcaccttactcttcgtctgaaaagtctgcaacataatacgttgcagcccgaaacgggtcagcacatggaatatgctggcaagataacactgtagagcaatgaacaatgaacaactataactatatgcatatatggctggtggaggctctatggttatttatgcagaaagctaatttttccctataaca

SEQ ID NO: 7824 - DNA, 341 bp, Triticum aestivum
  unsure at all n locations
  Clone ID: LIB104-032-Q1-E1-H11
gtcaaaaatatcgggtcgacgcggttcagataagaaggccctgtaggttgttcttgtacgtgcattcgccgtgtcagcggccaggcgacgcggaggggatgaagggcagagagagaacatgtttctgtctangtcatcctgcttacttangggaagtggagggcccgacagaaggcatgcaaatattgaagagggccgagactaatttgttaactgtgattttaaggtttatcgtctgtttatttctacaattttatttcaactttctatacatgcatacatgcaaaatacgcaagtgaacatgtgtgcaattttccccgcgccgatgaaaacatttttag

SEQ ID NO: 7825 - DNA, 427 bp, Triticum aestivum
  unsure at all n locations
  Clone ID: LIB104-032-Q1-E1-H2
tatacgacttcttccctaacgacgagaaagtggggatgaagcacatcaagaagtacgttgaaatgatgaacgccgagaaagtctcaagggccatattggttgtgcaacagaacctcaccccatttgcaaaatcttttcttcaagaactggagccaaagatccacttggaggttttccaggatgccgaaatgcttataaatatcaaggaacatgttctcgttccggagcatcaagtgcttgctaacgaggaaaagaagacgttattggcgcggtacgctttaaaggaaactcagctaccaagaatacaaattacggatcccattgcgaggtactacngcctcaaacgagggcaagtggtgaagatcatcanngccagcgagacagccggcagatacgtcacatatcgctaagttgtatgacagtacac

SEQ ID NO: 7826 - DNA, 453 bp, Triticum aestivum
  Clone ID: LIB104-032-Q1-E1-H6
cgggccgacggggattatcaatttaaaacctgtgtctttttcttttttttcctagtttgtattctgtttctttttcattttctcgttttcccttttttattttccaaaaatgcttattcttttaaaattggttcaaaattttaaaacacgtttgttttttcaaaatatgttcaaggaattaaaaatatttctattttaataagttgtagaactagtgaaaatgtttgtatcttaaaaattgctcacattgaaaaaagacgaacattttaaaaaagagcgaacaaaatttagatcatggttttttttgaatgtagaaaagattagaaaacgggaacattttctaaaattctgaacaaattttgaaagcatgagcattatttgaaactccttgaattttttaacattgaacttttctgaaagccatgagcgcttggctggccgaacgggtgcctg

SEQ ID NO: 7827 - DNA, 389 bp, Triticum aestivum
  Clone ID: LIB104-032-Q1-E1-H8
gggacatgctagatgacgtcattgttgcagaaacggcaaatgcgacaccttcagagaatgaaccagaggagccggaggcaaccgcaaaggcctttttggaggtcatggcctcgtcgaagaaacctctttatgcgggtgcgaaaatatctcagctggatgccatctcgcaactgattgcagtcaaggctgagtacggctgtagccagaaatgcttcgaagcattcctgggagtatgggctaacagcctccctgagggtcatgaactgccgaaaagcatgtacgatacaaagaacatcatgaaggcactctctatggattatgacaaaatagatgtttgcccgaagaattgccttttgtttaggcacgagtatgcggatgacatgtactgt

SEQ ID NO: 7828 - DNA, 57 bp, Triticum aestivum
  Clone ID: LIB104-032-Q1-E1-H9
gtcgtattacgagcaagatcgtcggcttcctgactatacgcttcgtcggcacgtccg

SEQ ID NO: 7829 - DNA, 168 bp, Triticum aestivum
  Clone ID: LIB104-033-Q1-E1-A1
cggggagcgacagcgtttttatgtgcatttgtatgcacgacttgttgagcacgacatgggcatgaatgcatgttcggtgatttgcttcgtcgatgttcataccgacttctacatcatgagatctgtacagttcatgtaatcatgtgcacctttctgtgagaactctgg

SEQ ID NO: 7830 - DNA, 436 bp, Triticum aestivum
  Clone ID: LIB104-033-Q1-E1-A10
attcgccggtcgacggggggcaagaagagcagcacatgatagcttttccccacggatccttctcgtcttccacgtgattcaagtcgtctcgcctctctccgtcagcccaaacatggacgcaagcacgcgcccgagtggaagccaccaattgcctgctgcagaacaagaagctcagcagcttgtaaatgctgctagggctgctaaaacggcgaggcttacgcaagccacataagaggctgagagagaaatagctgagtaccgtgcacaaatggaggctgatttccagaggaagctcaccgagaccagcggtgactctggcgcaaacgtcaaacgccttgagcaagagacaaacgtaaagattgagcagctcaagcagcaggcagcaaacatctctccagaggtgattcagatgcttctgaggcacgtcaccactgtg

SEQ ID NO: 7831 - DNA, 426 bp, Triticum aestivum
  Clone ID: LIB104-033-Q1-E1-A11
gtcgacggggcagtctttgtggtgttcaccatgaccctgaacgtgtacttctacatgtactacacgaaatcgacgcgccaggccgccaaaaagaccaacaaggccaccgccaatgtcggcatggctggctacgcatgacgagggagaaggactctggtttgatggaacttgcttgagtgctggatttagatagatattctggagcagaacgtagtagtttctggaaaatgtagcgtgtggtatggctctctatgatcagatcagatgtgtttgttcaggcctagttctcgtcttgcctgatctacagaatatttgatgtccaagacagcggcattgtgatactcctagatccaagttgtgagagtgagcatgatcatatgagaggggtgaaccggatggtccactgccaacgggctaagaattttt

SEQ ID NO: 7832 - DNA, 444 bp, Triticum aestivum
  Clone ID: LIB104-033-Q1-E1-A12
attcgccggtcgacggggaggagtgaccgcccagggccaagcccctggctaaatcgtaagtatccggatacccgagtaattcatactattcctttgttgcacagctttcccttatgtcgaatatgtttatgtagccacccaaagaccggctcgatgcgtcgtcgagcggttcactggactcgtcggatgtgaattcgcttccgacggcttcctccccccgccctacggacgacactgaagtgttgtcccaataggttccaatccaggaggaggtggtcctggaggcgccgcaaggtgacctcccggaccccaggagtgaaggggacagaaccccccagggctccaagtccggccctaggccggacaccgctccggaaccttcaaaggttccagagtccggcgggcgacctccttccaagaggatcaagcccaccgtgccgggga

SEQ ID NO: 7833 - DNA, 416 bp, Triticum aestivum
  Clone ID: LIB104-033-Q1-E1-A2
cgggtcgaccggctgtgcagaagaaaacccttttttttaggaacagaagattgcccttttactctcctagtaggaatatgtatgtgaatcaccacagaacaccccctacagcacaaactattttacataattacatttcacttttcaccttgcacgatttcctctgtgatttcccccatatatgacttgtctgttttgtgaggtatggtagtgctcacataattttcttgtattggacgatgatgctataggtgtcgagctttgcgatatatgatgatcaactgcatgcatagaaagatatagcagttgatttgcttcatagtatgttattgctaggctgctagttttgtgtcactcagtcaagtaggttatcatatgcttttagtgtttgcgagctatgtgcatatgtatacata

SEQ ID NO: 7834 - DNA, 363 bp, Triticum aestivum
  Clone ID: LIB104-033-Q1-E1-A3
agctcaaatcgaagaaaaactagacaagatgcagcacaacgacgatgataatgtcgactgcggcgttggtctcggatgtgtacagaataattcctcgctatcaggtggtaataacgcaccggaacggacgctgttcttgatgcgcggaatggcaaggcaaagcattctttcaccgagcaatggtgattgacgacttgattacagacaagatagatttggcacattcttacctgtaaagataatttgccaaataaagccgtttataagctttgccactttgataatctcttgtactgacacaatttgaaagaattcctttgacaaaaaaaaaaaagacaaaaaaaaaaaaaaagcggccgctct

SEQ ID NO: 7835 - DNA, 352 bp, Triticum aestivum
  Clone ID: LIB104-033-Q1-E1-A5
cgatcccaaggcatttgttaaactaaaaatcattggagattgcaccgtgtaatacaaagggtttgtgacttcggccaagccaagtgatacatgtacataccacggatttcccgaacatcacactaagggctggtcaacagctcctgcaatcaaacttccaagggtaaatgaaagcaattaagccgcataatccttcctccaacaataacgccttcgggaaacgagacgtccgctaaaggtcataatgtggaggatgaaacaccccttgtagcacctacgtggggaaagaagcccacgactggcaaatttcaagataaatgtggccgcatatggatcaaaatttaactaagaa

SEQ ID NO: 7836 - DNA, 355 bp, Triticum aestivum
  Clone ID: LIB104-033-Q1-E1-A6
tcgaggggtgcctggcggcgctgtgctgctgctggatctgcgagatgtgctgcgactaaccggccggcgacggcgaggttcctggcacaaggcctcggtgctatcgtacccacgaggagcgtatgcgtatacagagagagaattgttcttaatttcagtgcccgttgttttaggttctacatatatactcctaaggtgatgcacgcatgatcagtactgtacccgcctacctgtgtgcgtgtgtgagatatttcatgtatccgtccgtgtgcagtgccatattcatgcaccgcgtcgtgtgtaattaaccggtgtgtacgagaccgatatactactcagtaatactgtgattgag

SEQ ID NO: 7837 - DNA, 340 bp, Triticum aestivum
  Clone ID: LIB104-033-Q1-E1-A7
cgggtccagattcggccgttttgactggtttggcttctatccatttggtgaatttgtccaccatgaccaacaagtattttttcttatggcttcctcctttaaggatccaaccatatcaagcccccagacgtaaaaggccaagttatggggattgtttgtacggcggtgggtggcatatggctttggttggcaaaaagctggcatccgacgcaatgttggacaaggtcttgtgcgtctgcccgggccgtcggccagtaaaaacatgtacaaaaggccttgcttacaagggcccgacctgcggtgtggtaactaaggaagccctgaattagggggtatccgg

SEQ ID NO: 7838 - DNA, 401 bp, Triticum aestivum
  Clone ID: LIB104-033-Q1-E1-A9
gtcgacgggcagagacaacatcgccagggaaaaccccgtggtgcgcgccgccaagatcgttcggttctgatcaacaggacaccacgtctacgcgtacccggcgaaatctgaagcagcagaaccactcttttcctttctttcctttgaaaaattaaaggcgttcgcgagagtttcttaaaggtgaaaaaaaaggagaggaaggtgaaagattgcgatggggcagccacgacgaagaaacagtgcgatgataacgttgttgttgtagcggtggttggcggtggagaggagatgaggaggatggggttggtgtgtactgttgtcccacaatctctatttaattcaaatttccctattgtataaattattattattattatcatttctatgatgcactattcgtt

SEQ ID NO: 7839 - DNA, 440 bp, Triticum aestivum
  Clone ID: LIB104-033-Q1-E1-B10
ttcgcgggtcgacgggatgcatgaagttgggccagagatatttgaagacctcgaagactttgttacaacaggcaagcggccatttgaccatgtctatgaaaccctttttatgcaagtcatatagcccttattattgttgcatcagaatcatgatgagatggtgaaccatgttggttggtcgcctctgctacttcctcgttgatacttgcattgtgcatgcccctaccttcttatgatggttatgccggtgggagtagataggatgctaaagtagtgctatgcaaaaagggacgggaatatgcatagtgatggagataaagtattttcaaaggacttttcgaaaaccccgtcgggtgccacttatgcccgagggagatgatgagttgggtagccacttgatgacgaagtggtgtaccgaggcaagtgtgtgggttgttttc

SEQ ID NO: 7840 - DNA, 414 bp, Triticum aestivum
  Clone ID: LIB104-033-Q1-E1-B2
gggtcgaccggcacaaggagaagaaggacaagaagaagaagaaggacaagaagcacggcgagggccacaaggacgacgacccaccacaacaccatcatcgcatcccattagcatcgccagtttccttggagagaagtagccagaaacagcagcgccatggccggcatcatgcacaagatcgaggagaagctccacatgggcggcggcagcgacgagcacaagaaggacgaggagcacaagaagaaggacggggagcacaagaaggacggcgagcacaagaaggacggggagcacaaggagggcatgatggagaagatcaaggacaagatcagcggcgacggccacggcgacggcaagaaggacggcgagcacaacgagaagaacgacaagaagaagaagaatgacaagaagcac

SEQ ID NO: 7841 - DNA, 351 bp, Triticum aestivum
  Clone ID: LIB104-033-Q1-E1-B3
tcgagggttggtttagaatttcgccgggcttcgttcgctttacaaataaaccggaaaataaagccccgtaggagacagagaaagggcattttcgtacccgatgctcatcttttggctgtgattatgaaaccatcattcggaacaaatcttcagttgtggattaaatcgttctgtagtgatctttcgggctgtttattttttcttttcctctttgaatgtgctgtagtggccttattacatcatcgtatttgtcttgcagaacaaaaaaaaaaacaataaaaaaagaaattactgcagcacaaaaagatacaaaggtgaaataagacgataaatgaaaaaacataaaaagct

SEQ ID NO: 7842 - DNA, 450 bp, Triticum aestivum
  Clone ID: LIB104-033-Q1-E1-B6
gtaccggacctacattcgccggtcgacggggatggactcttttcggcggagtccgggaagtgaacacggtttttgggttatgtttgacgtaagtatgagtttaggatcacttcttgatcattgctagcttcacgactgtagcgacccgacccgaatggatcgaatatctatgcttaagtgtcatccctggatcggtatgctgacacatacagtactcgaggatttataacagaggtaaatcacatgtataaagtaacgtaaatattattacctcgaatacaaatagcggaagtaacaaggttgtggattcccatcaacaccaacgacaaagttgagtgtagaaaccgtaaccctaacgtatcacttactcgtcgtaagatatcttgcaacatgagacgttgcaaccatgtaggtcagtacattcaatgtactggcaaattcacaccatag

SEQ ID NO: 7843 - DNA, 416 bp, Triticum aestivum
  Clone ID: LIB104-033-Q1-E1-B7
cggcatcagttaaagcaattggtgtctcagaaggcggacatcgccgagaggatgatcatccccttggtggagctacaaaaggcaacaaacaattttgacaaagctcgcgagattggtggaggagggcatggcacggtctacaaagggatcatgtcagacctgcatgtcgtggcgatcaagaagtccaaggtcgcgatccagagggagatcgacgagttcataaatgaggtagccatcctctcgcagatcaaccatcgaaacgtggtgaagctctttgggtgttgccttgagacggaggtgccgttgctggtgtacgagttcatctccaatgggactctttaccatcatcttcatgtccaagaacccgcgccatccctagcatgggaaaatcgggtaaggatcgcaaccgaaactgc

SEQ ID NO: 7844 - DNA, 402 bp, Triticum aestivum
  Clone ID: LIB104-033-Q1-E1-B9
gtcgacggggcatggaggaggtcaagactcggctccaagggaagatcagtgagtggtacgaggacgaggaggccaagacccgcgccaaggccgtctccaactccaagcccggcaccgtttccaagctcaagtccgtctccatctccaagcccaagtccaagatcggctccgccaccagctccgcccccggctccggctccaactcgtgataggctgataggttttcatatttgatagctctttatatgtggttgaggagagactgcatattatgtttgattgcaagcttcgagtcactcattatgatagctctttagttatatgatcttcttggtattgtccactgtaatgtatggcgcgtaacatatttgacctgctatagcttaattttcatgccttgcc

SEQ ID NO: 7845 - DNA, 422 bp, Triticum aestivum
  Clone ID: LIB104-033-Q1-E1-C1
gggtcgaccgggtatatcaattcatttctgttgattgtttcctctgcatcttgcttattgctgtgcaatcatcagaccagctggacgaggcttgtcctgttttgactaggatagttgacaatggaagaaattgatatggtgttgagctattagtaggaatgcaatagctgaattacagccctcttgatttttttcgatattggttcgatgctaaaaatagtacacaacctaacagaaagagaagaattgccctctgtaattcagcatttgctgctctgttttcattgttgcctctgcatcttgcttattgctgtgcaaccgtcatactagctagaccaggtttgtcttgttttgactagaataattcacaatggaagaaattgatatgatgttcctccgattattagagtgtaacggctgaa

SEQ ID NO: 7846 - DNA, 428 bp, Triticum aestivum
  Clone ID: LIB104-033-Q1-E1-C10
acgggagaaggaaacaaagaaagctgcaaagaaggccatgaagatgaaaaaggaggaagagaagaggatggccacactgaattcctgcaaggatgaggacagttcatgctcatcggagtccagcaacagtgagtgtgaaggggaagtcgtcagaatgagccgctgtgccaccatttctgtgcctcgaacaccatctgcaagcacagttttccccatcatagtgccacaaatctcagactccgttgcactggatgctcagatcatttctgggtctgcaaatgcaatgcagcgcactaccaccagcattgcggttgtcgaaaaaccagtgctgaacagaatcgaggtctgcatgggtggcaaatgcaagaaggcgggctcgctcgccgtcctgcaggagtttgagacggtggttggcacgggcggcttgg

SEQ ID NO: 7847 - DNA, 430 bp, Triticum aestivum
  Clone ID: LIB104-033-Q1-E1-C11
gggtcgacgggaggtactaagaggcgcatccggtcatgctgcctccgcaggcgccggtgcagctcacgcgggccgcgcaccgggcgatcgagaccgtgcagcagctcataggagagccgctgagggaggatgggccagtgcttggcgatcactttgatccgcttcctcctggtgcattcggagcgcctatgcctgttgttccagagcagcggaagcagccttatcgatcacatgagaccagtgtattttctgcacacgatcccaagcccatgaaggcatcagcattcttgccaagcatagacccttctgtttcaagtacagttaccgggaagaggaagtacatgtctggaaattcttctcatcttccttcacgggcagtacatgagtaccagtttcttccagaacacactagcgatatatatgagagaac

SEQ ID NO: 7848 - DNA, 438 bp, Triticum aestivum
  Clone ID: LIB104-033-Q1-E1-C2
cgggtccaccggcatgcattacatatgatatgtgccctctctctctcacgcacacacgcatcctcacgattcatgactctcctgagtcctctcgcacccagcgtctaactgtaggtagacgtcacacacatatgtgctattcacaccctaccctcagaacttctaaaaaataaaagacgccgcacaccttttattttaactcacacgtcacacatttatactagtactgttgtggcgaacattctttgggcgtagtatattgtactctcacggagagaagcagtgcacgcacacactagttctctcacagccactcgcgagtacacgtaggagcacattttttgaagctaggagcgcatttgtttacaaagaggcatcccaattgacattttgactagtctagttttcaacttgatagagggtcgaggaccgcacatg

SEQ ID NO: 7849 - DNA, 423 bp, Triticum aestivum
  Clone ID: LIB104-033-Q1-E1-C3
cgggtcgacgcggcatcgagtagacactgttattgtgagaattcttaattcaagagttatagggagggacttatgtcaccacaaacagaaactaaagcaggtgttggatttaaagctggtgttaaagattataaattgacttactacaccccagagtatgaaactaaggatactgatatcttggcagcattccgagtaagtcctcagcctggggttccgcccgaagaagcaggggctgcagtagctgccgaatcttctactggtacatggacaactgtttggactgatggacttaccagtcttgatcgttacaaaggacgatgctatcacatcgagcctgttgctggggaagacagccaatggatctgttatgtagcttatccattagacctatttgaagagggttccgttactaacatgttt

SEQ ID NO: 7850 - DNA, 308 bp, Triticum aestivum
  Clone ID: LIB104-033-Q1-E1-C4
cggtcgaccatccgggtccgccggagacagcgatgtataaggtggagtagaaggatgcggctgctggagcttttctccctccgtgcacccaagaagcctttgtgcaaaatttgaaccagacattgcttttgtagaattgttgttgcttagtattacgattctagcagtaccgctcgctttatatatcccctacttctacatgtactcaattgtacatagctcgcccccatttgtactcgtacgatcttaaagaatattcgtcagagctaattggtgatcatcgtgtacatgctgtttgatgcttaaaa

SEQ ID NO: 7851 - DNA, 436 bp, Triticum aestivum
  Clone ID: LIB104-033-Q1-E1-C8
attcgccggtcgacggggcgatggcacgacgctatgggcggcataacggatgacctcttcaccatgattaacattcttcaaataccaaattaacattttttggatacatggtcaacattttttctatacagattttacattttttaaatggttgattacatttagaaatacaagtttaacattttttaatacatggtcaacattttttgcatacgcatttaacatttttaactgcttgattaacatatttcatatatttatttattttcaaatgcttggattaacatgttttaaatacatgatcaacttttttcatacacattgtatatttttgtacacattttctctatacacataatatttgtcaaatgattgattaacattttttggaaatgttttgatgtagattatttttgtaatatgtttattaatagta

SEQ ID NO: 7852 - DNA, 430 bp, Triticum aestivum
  Clone ID: LIB104-033-Q1-E1-C9
gtcgacgggattattgtatgagagaacttgcactagtgaaagtatgaaccctaggccttgtttcaaagcattgcaataccgttttcgctcacttttatcattagttaccttgctgtttttatattttcagattacaaaaacctatatctaccatccatattgcacttgtatcaccatctcttggccgaactagtgaacctatacaatttaccattgtattgggtgtgttggggacacaagagactctttgctatttggttgcagggttgtttgagagagaccatcttcatcctacgcctcccacagattgataaccttaggacatccacttgagggaaatttgctaccgtcctacaaacctctgcacttggaggcccaacaacgtctacaagaagaacgttgcgtagtagacatcaccctggtgtttggg

SEQ ID NO: 7853 - DNA, 419 bp, Triticum aestivum
  Clone ID: LIB104-033-Q1-E1-D1
cgggtcgaccggattttgatgaatataatatgcatgtgcttgctgctcctacttgcaattattatgagagaggaactacatctccgcctctttatgtttccaacacgataaaattgaaagaaactatttatactatgcattggcctttactttgtgagcatgaattgttctttcatgacatgccgatgcataggaagagagttagacttcgttattgcttgatttatgttactttgtgctcactactaaattacaaatcattgtttattaaaattggctttgatataccttgggatccaggtggatccattacttgagcactatatgcctagcttaatggctttaaagaaagcgctgccagggagacaacccgaagttttagagagtctttatttctattgagtgcttttatatagtct

SEQ ID NO: 7854 - DNA, 429 bp, Triticum aestivum
  Clone ID: LIB104-033-Q1-E1-D10
cggggccaagaaagaaggcggcgacggcggcgacgccaagaaggaaggcgacggcaagaaggacggcgacgggaagaaggacggcgacaagaaggaggagggcgacggcaagaaggacgaccagaagaagcccgccgccgtggccccgctgccgtacccgcaccacatgccgctgccgcaccacatgccgccgccctacatgttcaacgccgactacatgatgaaccagtaccggccggcgccgccggcctacccgccgccgtacgtgccgccgcagcactactacgtgcggaacatgagcatggaggagaacccaaactcgtgcgtcatctgctaagtcaaagtctatccctcgatcgctcgcgtacgtcccgtggggcgaccatgcatgcatccgtgtatagtagtattttctcgatcgtttttacg

SEQ ID NO: 7855 - DNA, 415 bp, Triticum aestivum
  Clone ID: LIB104-033-Q1-E1-D12
gtcgacaggaagaagccaaaggaaggtatggagcgtatcaccggttggtgggcaaaggcggtccgcgtcagtttctttctgtccgtcctcttctcccaactgggtggagtgattgcggggtttgccttaaactactggttgcagatacaggagaagtgtaagtttggtggttttcttgagatcattcccttggcacttgctcttggtttctggctgctgttccatggtttctttggctggatctccatatcccaaaactgactctggacttgatgagtatgaagccggctatgagttcttcgaattagtttgatttatgctttcttcaaagttgatgtccatgtgcggacaagatcaacatttatgcttccatgtcttagtttttaaaaaaagctgtgccccgtgggcaagagca

SEQ ID NO: 7856 - DNA, 385 bp, Triticum aestivum
  Clone ID: LIB104-033-Q1-E1-D3
cgggtccaccggtggaaccaacattatttgttgctagaacctaggttttttgctgcatcgacttctttttatgctaatgtgtttttgctggtttgctgcatcgacttctttttctgctactgtcttttttgctggttccaacaaccttttcgccggcggagctgcaaccggtgtgttgcaaagctggaaccagcgtccaccgatgctggaaccatgcatatttttgcgacaagcatatccatgttttgttggaaaccatctcatttttgctggaagtacgcgatctatctttttgctggaaccatatcatttttttgctggatccttgatttttgctggaacgtctttgttttcgctacaaatggcatcgaaaattgacaccatg

SEQ ID NO: 7857 - DNA, 452 bp, Triticum aestivum
  unsure at all n locations
  Clone ID: LIB104-033-Q1-E1-D7
gtaccgtatcaagaattcgccggtcgacgggggaaaataatagttcctccaaggatccacattttatctctggcttctttcttatattaaaattatgactagggataacctgctgaagagaaatttgaacaagtccattgatttgtttttcttttctgaacctgagagtgtacagcacctgttgtgtgactgtttggtagctagacttgtatggaagcaaatcagttgcttattctctatgcaaattggagtttcagtagagtcagttacttccctttgggttgctggtaaaatacttgacgctctgaatactgctgtagctgctgtgctccgggctttgtggaaacacaggaatgccatgatctttaattgagttgtttggttttccttgaccaagatctggtcgctgaccttacgaatgctcaggagatggcgatcgctcttcanacatc

SEQ ID NO: 7858 - DNA, 91 bp, Triticum aestivum
  Clone ID: LIB104-033-Q1-E1-D8
acattttatctctggcttctttcttatatttgaattatcactagggatattctgctcaagataaatttgtatcacgtccactcatttgttt

SEQ ID NO: 7859 - DNA, 381 bp, Triticum aestivum
  Clone ID: LIB104-033-Q1-E1-D9
cggggtaataaaaaaaaaaaaaaaaaaaaaaaaaaaaaaaaaaaaaaaaaaaaaaaaaaaccaaaaaaaaaaaaaaaaaaaaaaaaaaaaaaacgggccgcccaaaaggttcaaacctaacttacccttgaatgcaacttcaaaccccttcaaaagtgccaccaaatttcaattcacgggccttcgtttaaaaacttcttaacgggaaaaaccctggcttaacccaattaaacccccttgcagaaaatccccctttcccaacctggcttaaaaccaaaaaggcccccaccattcccccttccaaaaatttgcccaccctaaagggcaaatggaaccccccctttaccggcccattaaccccggcggttttggtggttaccc

SEQ ID NO: 7860 - DNA, 394 bp, Triticum aestivum
  Clone ID: LIB104-033-Q1-E1-E1
cgggtccaccgggagggctaataaacttttgcaataagtatatgagttctttatgactaatgtgagtccatggattatacgcactctcacccttccaccattgctagcctcttcggtaccatgcattgccctttctcacctcgagagttggttcaaacttcgccggtgcatccaaaccccgtgatatgatatgctcacacataagccttattatatcttcctcaaaacagctaccatacctacctatcatggcatttccatagccattccgagatatattgccatgcaacttccatcatcatcatatacatgactcgagcattcattatcatattgctttgcatgatcgtaagatagctagcacgatactttcatggcttgtccgttttttgat

SEQ ID NO: 7861 - DNA, 432 bp, Triticum aestivum
  Clone ID: LIB104-033-Q1-E1-E10
gtcgacggggatgatggagccatggatcgtgaggaggatctcttcctctcctcgttgctctccaagttggagacgctggaaaacgatgatgatccggacggtgccgaactgagctccatcaatcctcacccggagagcggcgaggaggcggggccaggcgacgtggcgaaagacctgagcaagatcaagaggcagaacatgatcacccacatcctgctcggcacggtgatggtgatgatcgccgcgtggcagttcaacgaggtgtcgttcctcctcgcggtgcagaagaagctgaccaaccctttcaagtccgtcggggacatggtcaagagtaccctcaagatagggaagaagccggtggtcgaggcgatcgaggcgtcgcctctgccccctgtcggcgtcccggacgttggtcgggctgatctgccgatg

SEQ ID NO: 7862 - DNA, 433 bp, Triticum aestivum
  Clone ID: LIB104-033-Q1-E1-E11
gtcgacggggagcatggcagggctggccgtgggtgcaaccatcctgcttaatgtgctgatagctgggccggtgtcgggggcgtcgatgaacccggcgaggacggtggggccggcgttgatcgggagcgagtacaggtcgatctgggtgtacgtggtggggccggtggccggagccgtggccggggcgtgggcgtacaacctcatccgcttcaccaacaagcccctgcgcgagatcaccaagagcacctccttcctcaggagcatgagcaggatgaactccgtctccgtctgattccttatcactagcaacgttgtattactactacaaggctatgtaattgtcgtcatcgtggccatatatccatggcgtatcgagtgggctacactctactcctctagtggtcttggcctaactgaacctgccagagtatgt

SEQ ID NO: 7863 - DNA, 423 bp, Triticum aestivum
  Clone ID: LIB104-033-Q1-E1-E12
gggtcgacggggagctcaaaccggatagttcgaaataccaatatgccagtagcagcagtcctcccatgccgacacgtcttccacgcagactgcctggaggaaagtactccgaagagtgaagcccatgaaccaccttgcccgctttgcacgcgagctcccgatagtgaaggatgtgtatcattctcggagcctcttcacgccgccctcagatccgctcgcaggaatcatggcattcgcttttcttctggtgatgcgggtggtagcagcagcagcgcaaacccttctcgcaacgaccatgtgctgaagagaaatcagtctgcgctcgcgccagcgcgcagcggctcgctgttccggaaccgtttcaagaagcagttccccttcaaggggaggctcgggaaggacctgtttggtggcaaggttttc

SEQ ID NO: 7864 - DNA, 433 bp, Triticum aestivum
  Clone ID: LIB104-033-Q1-E1-E2
cgggtccaccgggctcctgtatagattcctgatgtctccttgggcagtgaggttagggtttctcgtcatgtggggagatttggtatcaggtgcttcaaatctattcaagggttcgacgatgacgattacggctccagggcgctggttcttaggggcaggtacacgaagacttcccaactattatcgacaaggtcaagttgactcccgtaggtaagtggcgacaacagctcgttcagacgatggtagtggtcgttcgatggtctcgaaatctcgatgcatttttattattatgctttgggtgctttgtacttctggtgaactttggtaatgatctggatcattttcccaaaaaaatgcacgtgaaatgctacttatattctatagatacttacaagtatataataatcatatatgataaatcataatatgtgtt

SEQ ID NO: 7865 - DNA, 425 bp, Triticum aestivum
  Clone ID: LIB104-033-Q1-E1-E3
tccgtgttatcagcagtgacacacgttgcacgctcatcctcctaagccgcaaatattccatggccacgtatttcgacccggaccgtcagtcgaacgtagactacacaaatgtcaagaaggttcttgatgatgttctccccggctacgccaaatctggaggcaccttcaccaggcctattcgtaagtacggcaagcacgtgttctcccacaatacgacgttctgctgcgtcaagcagccgcctggcggtcagaagggtgcctactacgccatccatcacatgcgggcgatcgtacgggaccatcatcaacttctgctaccgagtaaactccaagattgggccgcgagcgtgtcggcaatccaggacgcggacctccgacaagaattctttcgcatccagtcggagtttgcggaaatcatccatcaa

SEQ ID NO: 7866 - DNA, 270 bp, Triticum aestivum
  Clone ID: LIB104-033-Q1-E1-E5
cggggtaagccaacaagtcagcctgccactatactgggtcccagctagcaaggggagtattcatttttttgtgtaataaggaggcacttccttgcgtgcgaagatgtagctggtgggtccaagctgtcagtggcggtaatgtttttttcgcaaaatacagaagccctttccgtgggtcccagatgtcaagttgaagaatcattaatttgcgcctaataaggaagcaattccttgccttccggcaatggaccaactgtcaacctccccaag

SEQ ID NO: 7867 - DNA, 413 bp, Triticum aestivum
  Clone ID: LIB104-033-Q1-E1-E7
aattcgccggtcgacgggaaggatcaaatgttgcaaacaagttaaaccttgcaatcaccgaagccagaatgcccaaactataggtttcagggttataggtgattgtcaacagtgatttctataaatcttgtttgagcattagatttggtgctgccttttttttagccgtgacacatttgcacatcgcatgttcctatcttacaattggcaaccaggtgtctaagtggcatataggaatatatcaggcagcgtgtatgttcagttaaaccttagcccgtcattggaatgattgatgtcatattgcacattttccacaattaaaaaaaaagaaacaaaaaatgaaaggagaagacagaaattagagaccaaaaaatagaataaaaggcaaataaaaaatagcggccgctctaaag

SEQ ID NO: 7868 - DNA, 401 bp, Triticum aestivum
  Clone ID: LIB104-033-Q1-E1-E8
ttcggccgtcgacgggggggagcagcggcaagaagcagacgagcaagatcgtcggcttcgtgaagatgcacttcgtcggcacctccttcccgccagctcgagcgagggatcggttggacgccagccgcgcgccctgctattcgtcatacaacgactacgagtacgcggcggagtggaacgctgtggttccggcgacggcggcggccgtggaggaggaggtggtggaggtgtgcgacgacacggcggagtgcgggtacctgtgttggctggaggaggagaggtcgtcgggtggcgtgccggcgggcgaggacgacggcgccgaggctagtccggcggtgaacgagatcgacaggctggcggagaagttcatcgcgaggttccacgcgaagttcttgctggag

SEQ ID NO: 7869 - DNA, 411 bp, Triticum aestivum
  Clone ID: LIB104-033-Q1-E1-F1
cgggtccaccggttctgtatattttatgtttcccttgtactatctctgtaccaaaaatgtcttatatttggtacagatatttctggaggttaaactactctaaaaaacgtcttatatttggtaaggaaggagtatacataaagccactagcccactgcgtataaatgcactgttcaagttcaatagatagactatcgctactcatcaaaccattctgccgcctctttatctatagcaaagtaactaaaccataactgatgataatggcaattctgaagttgacagacacacataaatgtgtggttatgcttgtataagaaaaccgagtcatccggttaacaagagaaaaactgaattaaagaccacacgacaacagattggctaactagcataaggagcatcatctgtcgc

SEQ ID NO: 7870 - DNA, 64 bp, Triticum aestivum
  Clone ID: LIB104-033-Q1-E1-F10
gagtcgtattatgtttggttggtttgataaatatgttctgctttctaaattggatataaacatt

SEQ ID NO: 7871 - DNA, 427 bp, Triticum aestivum
  Clone ID: LIB104-033-Q1-E1-F12
gtcgacggggtgagtaaaccagcctcattttggaaacatgatctcaaggttgaccatacttccctcttcgcaagaactgcatcctgacatgaagttacttctttgttagatcaatactgagagcaacctagatccatttagtagaagccagataaacaagactcgaagaagtgaattcaaaaggagaaatataaaaacaggctccaaggtgagaacacccacttcctacatcaagctaaaaacgaaagcattaggatgattaagactcttcttattacacatcgaagaacatgaggctaagagaaacaaaaactacaacatatacacatcgaagaacacgaggttaaatgaaagtaattgaaagggtgttacttaccaaagctcgttttacaggttcggtgcagctcctctccaacttgccactttc

SEQ ID NO: 7872 - DNA, 416 bp, Triticum aestivum
  Clone ID: LIB104-033-Q1-E1-F5
attcgcgcgtcgaccctggataacatccacatctgcatgcaatccacacagaccgatgtggagcgagcacaagctgatgcaaactgcagacctgttcgtcgatatcaagtgtaaaactctcaacacggatcacaccattgcggcgaacaacatcctgagcgcgatgcactagcaatctgtcacgcctgaggatcaaaggatcttgtgattaagtagaagtaggtaactcacacgcattgtcgagtcgatggattttgtacaattggcttggactttgtctttgttatgccgccccatatgcttcctagccatacgtacactttcgtacggttgttcaattgttttcttccggttgttacggagtccaaactagctttcggcatcaacaatgtctgactgacgtgccttacggtaaa

SEQ ID NO: 7873 - DNA, 357 bp, Triticum aestivum
  Clone ID: LIB104-033-Q1-E1-F7
gtaccgatcctacattcgcccgtcgacgggcacgatcatgatcatgaggaatatataggataataaggcggtgtattaccgccatgccccgttgagctagctgatgttgtttcggctagagaaaatcgttacgcccgctcataattcctttttcgatgctctggagaataataactactggtatatcattctatatatcaaggccggcttgtgaaataaatgatcctgcgccccggtttttgtgtcgtcgaaaaaaaaaaaaaaaaaaaaaaaaaaaaaaatagaaaggaaaaaagaaaaaaaccaaaaaaaaaaaaaaaaggaacggtaaaaagaaataattatgcttcaagcaga

SEQ ID NO: 7874 - DNA, 415 bp, Triticum aestivum
  Clone ID: LIB104-033-Q1-E1-F8
ttcgccggtcgacgggttggagatatttgagcatttaaatattttatattattttaaatgcccaaattcaaatatttatgatttaaatcaaaaaccttaggatggcctaggaaaatgtgcaccacttttggcagaggttctgaaccaaggcaaaaatgatgggcattttagaagggcatttcaggttcattgaaaaattattttagtaaccctagttggtttcagaggggactgggggttctgtcatccccatttcaagtttctgatgaaagagtaaacatgatgcaacactctaatgcatgactagctagggtgtgacatcagcggaaccccaggccgcccggatagatgcatcggcctggagccaccctgagatcagccccaggcgccccaacgctgcgcgaaagtccaggcc

SEQ ID NO: 7875 - DNA, 423 bp, Triticum aestivum
  Clone ID: LIB104-033-Q1-E1-F9
cgggtaaaaacaacgatggtagtgaagtgtttgattggtttgagaaatatgttctgcgttcgaaattggatgtaagcattgatcacctagagctgtgctcactgttatcacatggtggtgatgcaagagataaacatatcaccttattgatgaatgctggtctcctgacacgccaactaatagatccaaacatgtactggttttctattccaagtattggtcctatcttgaaaggcctatcccaggggaggaaggaagttctttcattactgggccgtcggaagtacaaggagatgctactatcttcactggagaagacgaggttgaggttatcacctctcgacgtgcggttccacctccgcgatctgattgggtctggtcacgtaaagaccgttcaaacacccaccggcttacttgctcgca

SEQ ID NO: 7876 - DNA, 438 bp, Triticum aestivum
  unsure at all n locations
  Clone ID: LIB104-033-Q1-E1-G1
cggtccaaaatatccgggtcgacgcggagatggaaatgaaagagaagtttgaaaagaaccttcaagaggcagcagataagtaccaaaacaccaacttgtatctgaagaacttagatgatactgttgatgatgaaaagttgcgagaactttttgctgagttcggaactattacttcctgcaaggttatgcgtgattcaaatggcgcaagcagaggttctggatttgttgcttttaaatccgctgatgatgcttcccgagctcttgctgaaatgaacaacaagatggttggcaataaaccactttatgttgcactcgcacagcgcaaggaagacaggaaagctaggctgcaggcacagttttcacaaatgcgtcncgttccaatggctccaaccgttggtcctcgtatgcaaatgttacctcctggtgtttcagtcggtc

SEQ ID NO: 7877 - DNA, 281 bp, Triticum aestivum
  Clone ID: LIB104-033-Q1-E1-G11
tcgcctgtcgacgggtgatacgtatgatgattgtgatatcaagattaggagggtgaatgttagagctaatcttgatatttgtattagcatgtttgagttttgtatgtagtctagtctagtgtggtgttcgtccgacgaaggcttcaggtgagcgcgccaaggaggtgagatgccaggatgccgtgtgaggcggcgagcacggcgagatgccgatggtgctgccttagaagcggcaagacgtatcagaagctggaaccgttatggactgcatcaaattgggt

SEQ ID NO: 7878 - DNA, 421 bp, Triticum aestivum
  Clone ID: LIB104-033-Q1-E1-G3
cgggtcggccccgactacacagtgatggccttcgccgccatgatgaggaagaaggtcacgatgcccgcccacttgatgtacgacgggcaggacgacaacctgtttgagcacttcagcgcggtggctcaacggctgggcgtctacaccgccatggactacgccgacatcctcgacttcctggtccagaggtggaacgtggccaacctcactgggctgtccggggaagggaggcgggctcaggatttcctctgctcactgggaccaaggttcaggaagctggaggagcgagctcagggcagggcgaagcagttaccggttgttcctttcagctggatccatggccggcaagtgcaactttgagtggcattgctaaacaattataagacaatttgttcttcttattttcaaaatatgaagcaac

SEQ ID NO: 7879 - DNA, 395 bp, Triticum aestivum
  Clone ID: LIB104-033-Q1-E1-G4
gctatgaaactgacctactgcatcgcggtgtccgggttcgtgtgcgcgctcttcgcgttcgggatcccgtacctgtcggccctgaggatctggctgggcttctccaccatcttcagcctcacctacatctttgcagcctgcgtgctgtcgctcaaggacggcttccgctcgccgcctcgggactacagcatccaaggagaaccgtcgagcagggtgttcaccaccatcggcgcggcggcgagcctggtgttcgcctacaacaccggcatgctgccggagattcaggccaccgtgcaggcgcccgtggtgaagaacattgagaaggcgctgtggttccagttcaccgccggctccgtgcccctttacgccattatagtcatcgggtactgggccta

SEQ ID NO: 7880 - DNA, 454 bp, Triticum aestivum
  Clone ID: LIB104-033-Q1-E1-G5
gtaccggatcaagcattcgccggtcgacgggggagcgtaacataataaacggaacggtggaaagttgcatggaaatatatctcggaatggctatggaaatgccatgataggtaggtatggtggctgttttgaggaaggtatatggtgggtgtatgatacgggcgaaaggtgcgcggtattagagaggctagcaatggtggaaggatggcaaaaagtgcatataatccattgactcaacgttagtcataaagaactcatatacttattgcaaaaatctagaagttatcaaagcaaagtattacgcgcatgctcctagggggatagattggtaggaaaataccatcgctcgtccccgaccgccactcattaggaagacaataaatacataaattatgctccgacttcatcacataacggttcatcatacgtgcatgctatgggaatcacaaacttt

SEQ ID NO: 7881 - DNA, 440 bp, Triticum aestivum
  Clone ID: LIB104-033-Q1-E1-G6
gtacgagcaagaattcgcgcgtcgacgggatatatgcactttctagcaaaggtcgtgccgaaattttccgtgaatttcggcatgacttgtgctagaaagttggacatatcgagtgctcgattgtcgcgacgggaatgaaacaacatttccgaaacaaaggtcactttttttaattattcactttattataaaaagctcgataattaaacgactacgacattgaaccctaggaaacatgaccgacaccgatgaggccggaggttctcagtcccaattaggtcgagcacacgcctacctcgactttctggcggatcaggagagacagcaagctgggactgagactggcgctgatgacgacggtggtggcgccggcgccgacactgatgccaccaacgacaccgacactaagactggcgctgatgatgttgctaactacagca

SEQ ID NO: 7882 - DNA, 313 bp, Triticum aestivum
  unsure at all n locations
  Clone ID: LIB104-033-Q1-E1-G8
gacatagttagaaactaagccgacggccaagccgtcggcatattccttcatacagagctaccagtagctgacacgtggcacctatgccgatcggcatngtggtcgtgggaggatcggatgggttggtacaagtatttgtaggaagacgtcgtgtagcgtggaggcgggcgattaactgcactttctgatgatgcgcttcgatggtatgattcacagattgtgtatataggcgcccaggctgctgccgacacgatcgggggcacttacgtgtggtttctgcatggcatgcagctgatagtgctcgatggagtct

SEQ ID NO: 7883 - DNA, 429 bp, Triticum aestivum
  Clone ID: LIB104-033-Q1-E1-G9
cggtggcatctgactcctggactccaacatctggttgcgacaaccagatagaaaggaaagggggaaaaagagggagagaagcaaccgtgagtactcatccaaagtactcgcaagcaaggagctacactacatatgcatgggtatatgagtaaagaggcatatcagtggactgaactgcagaatgccggaataagagggggatagctagtcctgtcgaagactaagcttctggacatctccatcttgcagcatgtagaagagagtaggttgaagtcctccaagtggcatcgcatagcataatcctacccggcggtcccctcctcgtcaccccgttagagagcgatcaccgggttgtatctggcacttggaagggtgtattttattcagtatccagttctagttgtcataagctcaatgtacaactccggg

SEQ ID NO: 7884 - DNA, 192 bp, Triticum aestivum
  Clone ID: LIB104-033-Q1-E1-H1
tcgtattagttggtgagttagtatgtgaatgagataatttgtgggtattgatgtgattggaagttcgatttgtaggcttttattattattatagtatgtagagatgagatttttatgttttcatgtatatttgttttggtatggggaggtaagatttgtagtgagtaatgtgatattgaggattggttttag

SEQ ID NO: 7885 - DNA, 289 bp, Triticum aestivum
  Clone ID: LIB104-033-Q1-E1-H11
taattaataaaacatgggcttttctgaaatttttgtaaatctcgtttttatctagtcctttcctgtcaaaaaaaaaaaaaaaaaaaaaaaaaaaaaaaaaaaaaaaaaaaaaaaaaaaaaaaaaaaaaaaaaaaaaaaaaaaaaaaaaaaaaaaaaaaaaaaaaaaaaaaaaaaaaaaaaaaaaaaaaaaaaaaaaaaaaaaaaaaaaaaaaaaaaaaaaaaaaaaaaaaataaaaaaaaaaaataaaaaaaaaaaataaacacatcaaaaaatcaaaaagattacatt

SEQ ID NO: 7886 - DNA, 396 bp, Triticum aestivum
  Clone ID: LIB104-033-Q1-E1-H12
ggataactaaaatgactcctatcacaaggagggcacgatggagaagatcaaggacaagatcagcggcgacggcaagaaggacggcgaccacaaggagaagaaggacaagaagaagaagaaggacaagaagcacggcgagggccacaaggacgacgacggccacggcagcagcagcagcgacagcgacagcgactgagccagctccggcccgcgctccggcagcgtgcagtgtaggcgagatcgatgatgaacacttgggagaagtgtgacagacatatatgttgcagggtttggagcgtgtggtagcatatgtatgtaatgcgtgacatgcctcatggatcttgtgatgtataataattagccggccgcactgcactgaacggtgcttgttataat

SEQ ID NO: 7887 - DNA, 418 bp, Triticum aestivum
  Clone ID: LIB104-033-Q1-E1-H2
caatatgtacaaacttggagcgtcttttgcatttagttttcatttttattttatgcaccatgctggtatgagatagtccttggttgatttatagaatgctctttgcacttcacttatatcttttgagtatggctttatagaatgcttcatgtacttcacttatatcatttgaagtttggattgcctgtttctctttacatagacaaccaccatttctagaatgctcttttgcttcgcttatatttgttagagcacgggcatatcttttgtagaaagaattaaactctcttgcttcacttatatctatttggagagatgacaggaattggtcattcacatggttagtcataaaatcctacataaaacttgtagattactgaatatgatatgtttgattccttgcaatagttttgcgata

SEQ ID NO: 7888 - DNA, 422 bp, Triticum aestivum
  Clone ID: LIB104-033-Q1-E1-H3
ggatcgaggagaaaggggatcaagaggatgaaggggcaccgcgccaccaccgcgggctggccaggcggccgttggcggcgagggaggagtgccggaggaggttcgctttctttggcagaatagggggtcgtctcgtatgtagaggtacatgagcttcctctactcacttttagtttccactccttctaagattttagcaatatcatctattatattagtactactactcagaagttttcggactggttcgtgtttacagtttagtcaatattgtgtgcattaacgctttcttggatatgcattttgatttgactggattaccttaatttatcatgtgtgctaactctaaagtctaaactatgaccatacggttgccacatacctacgaagacatgaaatcttcattcttggtaaaatacaat

SEQ ID NO: 7889 - DNA, 409 bp, Triticum aestivum
  Clone ID: LIB104-033-Q1-E1-H4
gatgaatacaggaatctgttaaaagaactcgttgttcagggcctgcttcggttgaaagagccagctgtactgctccgctgccgcaaagaagatcaccataatgtggaatctgtactgcattcagcaaagaatgagtatgcatcaaaagcagatgtccatgagcccgagatactagttgaccacagtgtctacctgccaccttctccgagccatggcgatgagcacggccagatttgccatggaggtgttgtgctggcttctcgagatggaaagattgtgtttgagaatacagttgatgcaaggcttgaagttgttttccgcaagaaattgccagagatccggaagcttcttgttgcggcataatgcccacttgtattttggtgatggtacagctgtttctatgtaaaat

SEQ ID NO: 7890 - DNA, 452 bp, Triticum aestivum
  Clone ID: LIB104-033-Q1-E1-H5
gtaccggatcaagaattcgcgcgtcgacgggttcattgagctggacgaagatcgatgcttcagcattaagctcgaggagaccttcgatgttcatacggtacacaacgacgacaatagttttttttcgtaattaagcacttcaactattttaacgtgtatttttcatcttttccaattcgactagcttatcccatgctatgcaagacgccatgtcttggagaggatgggttttgaagaccatgaaagtatggaaaccaaaaaattctcctaaggacccatcatggtgtggattttcaagtaaagttgtacaatgctgagagtgtaacccattttggttgcaaaaattcggaagcactttgcaagatgtatggttttgatgagggtatgcttgtcaccatggatcttggtgatcatacaatccagcaagacaatatgggcatttgggtccttgt

SEQ ID NO: 7891 - DNA, 400 bp, Triticum aestivum
  Clone ID: LIB104-033-Q1-E1-H6
cgggctgaagcaggacctggagcgggccgaggaagagctcgacctcgttaagaagcagctggaggacagccaaggtatgtagtatcctgtgtgaatatttaggaaagatgcatggttcgtgctgacgaaagtgtcatgaactgtattaggggccacaaccgaggtggcagcccttaagaaggcgttagccaaggccgaggacaaagcggccaaggaacgcgcctcgcgcgagaagcgggaggcccgggtcagcgaggtccagcaagagctccaggacgtcgtcgagaagtacgagtccctggagcgtgattctaagactcaagagcccgaacttgccaaggcccgccagagcacacgagatgcccgagaaaaagctcagagcgccctccaagaaatccag

SEQ ID NO: 7892 - DNA, 355 bp, Triticum aestivum
  Clone ID: LIB104-033-Q1-E1-H8
cgggttcaactaaggcattgatacccacgcaactttgcaagagaaacgcgcatttgacatcaaccgggcgcactaaggcggatcgatgatcacctgtgggcttcagcgggggcgcaaaacgatgcagtctgaggtactcctgtagccgaagtgatgtctcttctacagtgtcactctaggttcacttcactggccttcgattaacaatcatcctgtaagggaaagctctagcggtaaacatgttatccgccgtctctcaaatcgccctatctccaaccgggttaacaccgaaaacgcccgtaacgatcgcacgtcttatcatttgcacaccgtgatgcgaggcttggactctcca

SEQ ID NO: 7893 - DNA, 350 bp, Triticum aestivum
  Clone ID: LIB104-033-Q1-E1-H9
ttcgcgggtcgacgggatgatccgagaggccgacgtcgacggggacggccagatcaactacgaggagttcgtcaaggtgatgatggccaagtgatccagccgatgttcatgtccggtggtattattatttttaccggggaggaggaaattgtgcattgcatattagtagtaaggaatgcggctctcgtttccttgtctctgccccgaaccagaagaagcgtactagtagacgtagttgctgaagagcactcatggaatcctcctcccctgctgctaccctgtctctctcccgtgtgtcattgaaacatctttctttctgtgtgaatctgcaagacttggccccttcgtga

SEQ ID NO: 7894 - DNA, 405 bp, Triticum aestivum
  Clone ID: LIB104-034-Q1-E1-A11
gtctccaggttcctgcgaggtgatccgtatgatgattgtgatatcaagattaggagggtgaatgttagagctaatcttgatatttgtattagcatgtttgagttttgcatgtagtctagtctagtgtggtgttcgtccgacgaaggtttcaggtgagcgcgccaaggaggtgagatgccaggatgccgtgtgaggcggcgagcacggcgagatgccgatggtgctgcgtgagaagcggcaagacgtatcagaggctggagccgtgatggactgcatcaaattgggtcgggtgaaccggccggtcgttctgtttgttggactagctgttcatgcgtgagttcgtttagtcctagctgagagtatcgttgctagtagttgatgcatgcatgtagttggcctggtcac

SEQ ID NO: 7895 - DNA, 411 bp, Triticum aestivum
  Clone ID: LIB104-034-Q1-E1-A2
attccaggtcgacgggacatggaaattactaactacccattagatggacaatccatcggcccgatttccactgctctaaataggggtaggttactaacttcaattagacgtgacacgaccgcctctgagcccattccgacactatgggcgtcaaacatgggcggaaaaacacatttgattcaagctcgtctgaaagacctatgtttctccctccagtccccattcatacacggtgggcggcataacacactcgactcggcagaaattgatgtacgcaaatattttcaataggggcaggtttgtaacttcactcacacgtgatacaagcgccctacctgtcagcctcgttcatacactgtgggcgccaaacaccctctcctcgcccgaaatccctctgggcaaatattggcg

SEQ ID NO: 7896 - DNA, 419 bp, Triticum aestivum
  Clone ID: LIB104-034-Q1-E1-A3
ctcccgggtctacagatacagtcatctaactggtttattttaggctatggataaatgattctagcttcttgtaagagcctgacatggacatatgaggcatccatacctggtttgaatgacctccgacaccgtttacatgttacgacacgtccgaccatttatcacctattttcatcgagaaaactctagaaatgcaaaaaaaattaaaaaatctaaacaactctgcatttccttaccaagaaaactctagaaaaatacgaaacttgttgaaaaccaaaacaatttgtcatggtgccttgaattgttcatacgaggccatgaaaaaaattaggaaattttcaaggatgtcaaaaactgacgtgctctctaacacaccctttctggccaacctgaacaccttccgttgaacatgatgtttt

SEQ ID NO: 7897 - DNA, 430 bp, Triticum aestivum
  Clone ID: LIB104-034-Q1-E1-A5
ccgggtcgacgggttggagtatatttgaagtcaccattagttgatctacccacctctatgtgcaacccaagatatttctctgagaacaattatttgtgacctctaggatttccttaaccattgccctagtttctccggacaacccttcccccaaaaatatgttttattttatgtgttatctagaatagcatctaccagtattctcatctccggttggttgagtaaccgttgggcctaggaataaaaggcccattggcctgttccgggttggccatcccatatgactccacatcatgagaaaatcactagttaagaggtatcccttgcaaaagttactctcaaactccactcacgacaacaagtttgtcaaaacttatcgacatggtgttgataggttttgatgaactttaatttttgaagaaactttaat

SEQ ID NO: 7898 - DNA, 415 bp, Triticum aestivum
  Clone ID: LIB104-034-Q1-E1-B1
tcccgggacgcagaatatcgtgatcccgccgggcaacttcctggtgggcgcactggagctgtcgggcccctgcacctcctccatcatcatccggctggacggcaacctcctgtgcaccggcgacctcaccgcctacaagaagaactggatcgaggtgatgcgcgtggacaacttcgccatcaacggccacggcatcatcgacggccagggccccctcgtgtgggagaagaaccagtgcagcaagcactacgactgcaagatcctccccaacagcctggtgctggactacgtgaacaacgcgacgatccgtggcatcacgctcaagaacgcaaagttcttccacctcaacctcttcaactgcaagtcggtgctggtggagaacgtggagatcaccgcgttggggaacaaccccaac

SEQ ID NO: 7899 - DNA, 457 bp, Triticum aestivum
  Clone ID: LIB104-034-Q1-E1-B10
gtcgacgggagtgatccacctattcaattacttcaaccatttccgagcacctcatatcactttccaaggcatatgatagttttatcatctgtggacgatttctttctcgttcaacgccctttttcaatggtctcgaagagagaaatttcccatttttatctatggagtcacaaccgaggtcgtggtaaatccatgaatttgattcgatttgtttttcttatactatttgtttttcttatactatagaaatagaaataaattttatttctttcttatactatagaaagaaataaacctttgaattcagcattattccaagactcctatttcaaagtctatcttttaagggaaaaatgaaaataaaagtaacccttcttttcccattccctctctattgcatgggtggaagaactaaaatagaggattctgaaaaaaaaggaccttcgaaatccaattt

SEQ ID NO: 7900 - DNA, 394 bp, Triticum aestivum
  Clone ID: LIB104-034-Q1-E1-B11
gtcgacatgcctcctgcaaaggttattgacattcctcctgcaaaggcgctgcaaaaggttgatcctctggtgccatccaaggtgctccgaagagatgctcctccacagagtttgcctgtgttgccgaaggaaacaataaaagttgcttcttcccaccagccagacaggcagctgcagcccgttctgcacaaaccgaaggtgcctgtagtctctcccctcatcaaacagcagcagtcaagcaccttggcgaaagaagagccttgttcctctggcaggaagactgaaaaaaataccagaggttaagcagtcaaagtctgatcgtaagaagagccgcaaggctgagaaggaagagaagaaagagaggaaattccgagatctttttgttacctggaat

SEQ ID NO: 7901 - DNA, 403 bp, Triticum aestivum
  Clone ID: LIB104-034-Q1-E1-B3
gtcgacggggtccgatgaggcggcgacaaagtttaagccagcagctggcgggaacgccgcgggagccgacgcccagctcacggaggtgctggacttcgttgtggtggatgaggatgtggagaagtccagggactgggagtggaagtggagctgcaacgagtgcaaggcggaccccaccgcgccggcaggactcgtcgccaagaacaaggagttcgacaagatcatggatatcatacctgccatcatcaagcaagcagtcgccggcgcggacaattccaccaaatcggacaccaaatccaaatccaaatcctagggagccaactcttcgttatgtctactttcaaccttcgccgttgatgcatttctattgcgccatcccgtctgacccacaccagcagggtgt

SEQ ID NO: 7902 - DNA, 382 bp, Triticum aestivum
  Clone ID: LIB104-034-Q1-E1-B4
tcacgggacccgaggagagtcatggtcagaagaggagcacaaaaattttctacttggattgaacaaattaggaaaaggtgattggcgtggcatatcccgtaattatgttgtctcgaggacacctactcaagttgctagccatgctcagaagtatttcattcgccaaacaaatgttaataggagaaagagaagatcaagcctcttcgatatggttattgaggatcctagtgaccagccactctcccgttcatcgtcacaagagatgccgctctcccgttcatcttcacaagatgtagaagagttcgtagatgatctacgacctgttactgctcctgtgacaccacccgctcctatgcccgtgataacatctgtttctgtccca

SEQ ID NO: 7903 - DNA, 271 bp, Triticum aestivum
  Clone ID: LIB104-034-Q1-E1-B8
tccgggtcgacgggcgggatcatgatcatgaggaatatataggataataaggtggtgtattaccaccatgcccgttgagctgatgtttgtttcagctagagaaatcgttacgcccgctcataattcctttttcgacgctctggagaataataactactggtatatcattctatatcaaagccggcttgtgaaataaatgatccgccgtcttgccttcaaaaaaaaaaaaaaaaaaaaaaaaaaaaaaaaaaaaaaaaaaaaaatacataag

SEQ ID NO: 7904 - DNA, 333 bp, Triticum aestivum
  Clone ID: LIB104-034-Q1-E1-C1
taaggtggtgctgatgacattttgaggtcgataacgtggaagagcatggattgaggtggctgttaaaaaaaaaaagaaaaaacaaagagaaaaagaaaccacaccgcctaaaaaagcaaaatagatcaaagagacgtcacatagacaacatcaccatcaacggaaacagaaataaacaacggacattgcaccctcattataggataacaaccacgtgcaacaaacactacgactccaacataatccccaacaaactaaatgccggagtacgctaacaaacctaacattcatggcaacaccctcaataacgcaaaattctaccacctcaacctc

SEQ ID NO: 7905 - DNA, 339 bp, Triticum aestivum
  Clone ID: LIB104-034-Q1-E1-C11
tcaaggggttaaaaattgtcagtactcaatgatgtatcgcgacctgaacgacataagcgacagatggcccttgtacaatcatcagaagcagagaattccgcgtggtggagcgcgtcgtgcgcgaggaatccggggcatccatgatgcacacccgcaccaaattaccaaaagtgggcgcttgtcatgcaagtcaagcggcaagtcgctcgtgtctagaaaacggtgatcaaagatggcgccgaccagaacgactaccggcgcgcactgcagcttattctcaccggcactcgcaagaaattcaaataaatgtgttgaagatcatcaaaggaaggaaaaaga

SEQ ID NO: 7906 - DNA, 442 bp, Triticum aestivum
  Clone ID: LIB104-034-Q1-E1-C12
attccgagtcgacgggggtaccgtgatgatcatcggggcagagattctagaaggcgaagtcggagtcggagtggagatagatatggacgtgacaggtacagagagagggatcatcatcgtcgtagcaggagtcgtagcactagccctgatgattacaagaggcgtggcagagacagaagtcctagtcgtagcaggagccgcagctacagccctgatgatgacaggaagggtggcagagacagtttgtcgcctgcacgcagaagcactagtcgctcccctcgcaagacaccacctcctcgcgaggggtctcctgctaagcgcaatgatgatcgatctcctgctaagcgcaatgatgaccgttctcctgttaggcgcaatgatgaccgttctcctgttaggcgcaatgatgaccgttcccctgttaagcccaattattaccggt

SEQ ID NO: 7907 - DNA, 195 bp, Triticum aestivum
  Clone ID: LIB104-034-Q1-E1-C2
ctggacagcaccctcctgagcaccggcgacctcaccgcctagaagaagaactggatccaggtgatgcgcgtggacaacttcgccatcaacggccaccgcatcatcgacggccaatgccccctcgtgtgggataacaaccactgccacaagcactacgactgcaagatcttccccaacagcctggtgctggaccac

SEQ ID NO: 7908 - DNA, 427 bp, Triticum aestivum
  Clone ID: LIB104-034-Q1-E1-C3
attccaggtcgacgggatcacgttattcatggcatgatcatgtatataggcaatacgcctgtcacaagtagaccgactcctgcctgcatctactactgttactccacttcgagagcacttctatgcttgcctctccagatattaagttcatgacaaacagagtaatgcatgaagtatgatgacataatgtatacagaataaaaccaagcaatatgattaaaccatgtcgttttccccttagtagcaacaatacaaatacgtgccttgttacccctcctgtcatagagtgaggacaccgcaagattgaacttattagaaagcacctctccccctgaagataaatcaatctagttggccaaaccaaacggatggatcggagagaaatgcaaagctataacaattacacataataaagttaaaaaaagac

SEQ ID NO: 7909 - DNA, 314 bp, Triticum aestivum
  Clone ID: LIB104-034-Q1-E1-C4
cggggactgcgaaagccacgacatctaggttttaataggttgctcctagtattactcactgtataaatttgaaattcagaacaccctctcaaacatgatcagatctcataaagctcacatcacgtcacaacggaatggacacgcgcgtaaacgggtcgatcggtcgacctgacctggattgccgctgccgttaacgctgcacacattgtcgatgttccacatgttttactactattttctttcgaatcgtctcatctttttgtttagcggtgagatgtgtatattacccggtcctgggaaggggaggtgaattg

SEQ ID NO: 7910 - DNA, 384 bp, Triticum aestivum
  Clone ID: LIB104-034-Q1-E1-C9
attccgagtcgacgggcgatgaaaagaaatgaggcctccacagcttcaagcgcctcttctaagtctctgtttgccgtcgcaatggattgttatgactactgtctcgtttgatcggttgatcgttttaagatatttggttgtcttgtaatcggatatattatgcgctccagaacatctgagatgtactaaacttgagcctaaataactggttgctgtcaaaaaaaaaaaaaaaaaaaaaaaaaaaaaaaaaaaaaaaaaaaaaaaaaaaaaaaaaaaaaaaaaaaaaaaaaaaaaaaaaaaaaaaactaaaaaaaaaaaaaaaaagaaaaaaaaaaaacccaaaaaaaaaaacaaaaaacaaaaaaaaaaaggggcgccccaaaa

SEQ ID NO: 7911 - DNA, 458 bp, Triticum aestivum
  unsure at all n locations
  Clone ID: LIB104-034-Q1-E1-D12
attcncaggtcgacgggggctcaacaatactatggaacttcccgacaaggtgaagccagtgcaggaaatcagggaatgcaatcaccctacagatccagttcgtttcctgcacctcagtatgcactgcagagagagaatgtttttcctgagagacctgatcaaccggaatgcatatactacataaagactggagattgtaaatttggtgcagtttgcaaattccatcatccccgtgtgcgttcacagcctcccccagactgtatcttgagcccaatgggtcttccattacgcccaggggaagagctctgcaagttctattctcgctatggcatctgcaagttcggcgtaaactgcaagttcggccacccgatggcggctccgatgggggtctacgcgtacggctactccgcctcggcgtcgcccaacgcgcccatgggccggcgtctcctggagtcccc

SEQ ID NO: 7912 - DNA, 435 bp, Triticum aestivum
  Clone ID: LIB104-034-Q1-E1-D3
attccaggtccacgggaggcacccaagaggcaacaattcagtcaattcttgaaatgggtggtggaacatgggacagagacactgtgctgcgtgccctacgtgctgcattcaacaacccggagcgggctgttgagtatttatattctggtattcctgagccgatggagattcctgcaccaccaccaagtgcccagccagctgatcctgccctggcttcacaagcagctcaacctgcagttgcctcttccggtcctaacgctagccccttggacctcttccctcaagccctgccaaatgcttcagcaaatgctgctggtgaaggaaatctggatgttttgcgtaacaatgcacaattccgaagcttactttctttagtgcaggccaaccctcaaatcttacagccattgcttcaagagctgggaaagcaaaaccctc

SEQ ID NO: 7913 - DNA, 374 bp, Triticum aestivum
  Clone ID: LIB104-034-Q1-E1-D4
attccaagtcgacgggcaattatcagatagccactggcctaaagttgcaaggacattcaacatcattgaaggctcaatatttgcctttcgcttctgcagtttcccagatgagattcatctgtctatttaccatgtatgatgctattttccaaaggtttttgatgctgcatgtgaaagttggtgctgttgtgtaatggcgtaattgagtgccgaagctagctgatgtaattcaattatgaaatcctggttgcttgtatatggatatgaaatatctggcatgttttataagaaatatcagtttgattagtacatggattatcaataataggctaattaccctgcatagtggggttttctattgcacgcggttactt

SEQ ID NO: 7914 - DNA, 443 bp, Triticum aestivum
  Clone ID: LIB104-034-Q1-E1-D7
ggtccaggactccgggtcgacggaaggcaccatactattatgagtgcggtgatctagaaggttcagtccgccaagagcggactgactgaagcctgtgccagccttctaacaggctttgaggtaagtaaagaatatgtaaaattattatcgcatagatagtaacccatgatgctctgttcggcgttcagaaagaaaagccgaatagaggatctaataatcgcgggagtctaacataatcaagtcaatatgtgtacgcaggcttcgctgctggcctctgctgcactgactgcggaggtggatacgctgtagcagaaccttaagcggtccgagcaagagctcgtcctagccaagcagcagctcgaggagaaggatggtaagaaataccttattgaaatatgtgaaaggtgcaattgcaaaaagtgacaggattaacgcgggtattg

SEQ ID NO: 7915 - DNA, 421 bp, Triticum aestivum
  unsure at all n locations
  Clone ID: LIB104-034-Q1-E1-E11
attcncaggtcgacattgtctggaaaagattagagaagctcaaaaggatgacaaagaaattgctgaaataaaggagaagatgagtgaaggaaaagctaaaggttttcgtgaggtcgagcacgacaccttgtggttcgaggaccgtgtttatgtgccaaacaatgcagagatcaggaagttgatacttcaggaagcccatgagtcgccatactcggtacacctcggaaacaccaagatgtatttggatttgaaggatcgtttctagtggactggaatgaagaaggatattgccgagtatgtagccgtatgtgatgcatgtcagagagtgaaggcagaacatcagaagcctgcaggattactgcagcctatgcccatacccgaatggaagtgggataagcttggcatgggttttatcaccgga

SEQ ID NO: 7916 - DNA, 405 bp, Triticum aestivum
  Clone ID: LIB104-034-Q1-E1-E3
attccaaggtcgacggggacgttgaaaagctgaatggcaggatagtgaagtggctgaagcccggtgggcatattttcatcagggagtcctgcttccaccagtctggggattccaagaggaaagtgaacccgacgcactaccgggagccaaggttttacaccaaggtgtttaaggaatgccactcctatgaccaagatgggaattcctttgagctttctctggtaacttccaagtgcattggagcttatgtgaagagcaagaagaaccagaaccagatatgttggctatgggagaaggtcaagtgcacagaagacaaaggctttcagagattcctggacaatgtgcagtacaaatccactggaatcctgcgttatgagcgcgtgtttggggagggttatgtcagca

SEQ ID NO: 7917 - DNA, 378 bp, Triticum aestivum
  Clone ID: LIB104-034-Q1-E1-E4
attccaaggtcgacgggccgtgctgacgtgcccaggagaagaagttgatccagcaggtggtgttcgccagctacgggaacccgctggggatctgcggcaactacacggtgggcaaatgccacacgcccaaggccaaggagattgtggagaaggcgtgcgtggggaagaggagctgtgtgctggccgtgtcgcacgaggtgtacggcggggacctcaactgcccgggcaccacggccacgctggccgtgcaggcaaagtgctccaagaggcagaggaccgccgagcaataagtaagctaagctcagatatgtactgctatgtagatcatctcatcaccttcacctttgccgaccatggtctttttcatgctgcttgttt

SEQ ID NO: 7918 - DNA, 439 bp, Triticum aestivum
  Clone ID: LIB104-034-Q1-E1-F1
ttccaaggtcgacctcgtcgatctaggggccagcgccgccggcagccggaggcgcatcgtcctcgtccatgccaccacgttgctgcacccggaccaaggaggagggtgaggcgccacgctgtcatgccctcgtcaaggaggaggaggactctgactaagcgtgggcgatgccggagccgggcttaaggaacagcggccctcgggaggcccctcccgttgtttgttttttgtttcctgcattaagagtcatgaagagccccatggggcgtgtaatgaactgtggcgcttgcacctttatatcagtgtttcccgcccatattctaggatttacattgttactaattgaaaggttcctgcctggcgcgattaggataacttagcttggtgcgcctgtgacccttggcgggtccctgcgtcaagggggcgcgctcctccggaa

SEQ ID NO: 7919 - DNA, 388 bp, Triticum aestivum
  Clone ID: LIB104-034-Q1-E1-F11
ttcctagtcgacgggaacggcttcatgcaagtctgatcgattcgaagcaggttgagttcagttcagctagaggaagacgaaggcgtttcgatcagtccgatctcctgctccttttacatgatgattactattatcttaatcttagtgcatgtgtatgtaatatgcaccatgaattggtagtgcagcgcagtgcagcacagcacatctctgaacctgggaaggtactactagctttcttttcactcagacaagtcgggagggggtttcttgtcagttagtcggtttctggcttgtcagtagctgtggtgcgtgtcgtgtggatcgagttagttgtactaccagaaattcggaatgacatggaaaccatgcatagcatagcaaaataaaa

SEQ ID NO: 7920 - DNA, 401 bp, Triticum aestivum
  Clone ID: LIB104-034-Q1-E1-F12
atggctatggaaatgccatgataggtaggtatggtggctgttttgaggaaggtatatggtgggtttatggtgccggcgaaagttgcacgatactagagaggctagcaatggtggaagggtgagagggcgtataatccatggactcaacattagtcataaagaactcacatacttattccaaaaatctattagtcatcgaaacaaagtactacacgcatgctcctagggggatagattggtaggagaagaccatcactcgtccccgaccgccactcataaggaagacaatcaataaataaataaatcatgctctgacttcgttacataacagttcaccatacgtgcatgctacgggaatcacaaacctcaacacaagttattatacaatccacaactactca

SEQ ID NO: 7921 - DNA, 425 bp, Triticum aestivum
  Clone ID: LIB104-034-Q1-E1-F2
attccaaggtcgacggggtcgcagctcgaggcccgcgccgtcgggctcaaggtcgtctgccccatctgcaaggcgcaactggccaacgagaagcagttgattgatcactatggatcaaagcatcccaaggagaaacctccaggtccatcaaatgcagagtgactgatgcgaagtggaagcatgagctatactttgcctgtttctgagggtgttcaatctgctccacacttggacgacttgagcctcagctttaccctatgtaatgcatgcatttccacttgttccaggcaagagcctttgatgaccatgtatttgccttctatgagtatctttgtccaactgtcaacataccttcaaactgtatgtggtgcaatctttggataagagaatgctaaacttttttccaaaaaaaaaaagtaaggggg

SEQ ID NO: 7922 - DNA, 353 bp, Triticum aestivum
  Clone ID: LIB104-034-Q1-E1-F4
tcatccgttcgttaccggtctcatgtagtttttgctttgtttggtatgttcgttgtcggtccctcaaaaaaaaacaatagtgagtgtacatggatttgaaccatggttgcgaggactcatgaaccaactcatccaaccaaagattctgcagaaagagagggagcttaaaccgtctcgccatataggtggcattcatttacgttttggaaacatccatcatgtacgattcgttttttcaaacctcctccctatatgtatgttgtggaccacagttgcgggcgtgttgcgccaagggttggagctccagcggaaagaacgggagatggggctactagaggccgttatccgggaaa

SEQ ID NO: 7923 - DNA, 448 bp, Triticum aestivum
  Clone ID: LIB104-034-Q1-E1-G10
attccttggtcgacggggactcggtgacgatatacttgtgccgaaggttactttttgagttgagtcgatcccggaacaggagccatgcaaagatcttcgcgtgatttggaacgcgtgaagaccagatggcaatggcatgcatgtcgtcgtcgtcatcgtgggagcccatggttagcgcgtatgctgccctcgtggagattcatcatcaccacccttgatgtctctcccgtctccacctttcaccttggcaccaacacccaacatcaccgacgcagtaatccatctatagttctgcacacaaaggccggggaaaagacaggcacaacagctacgagctcatgcacaggatcatagtctggcatgaatttcacctgattttgttcacgcgaatgatgcaacagtacttgttggatcgtggtgaactgtatatttaattttctcctcaagg

SEQ ID NO: 7924 - DNA, 419 bp, Triticum aestivum
  Clone ID: LIB104-034-Q1-E1-G11
tcgacaccgccacattaacaaccctaaagaacgaagccgcataatataatagataggagtaaacatacactagtagaacatagggctttcgttcgggccaaataagccccttagtcccggttcagtcatgaaccgagaccaatgggggcattggtccgggttcgtgaggctaaaggcattagtcccggttcaaatgggacctttagtcccggtttgagacacgaaccgggactaaagggtgcgatgccctttagtcccggttcatacctcaaatcgggactaaagattagacctttagtcccgtaggcctgtttgcaaatttctagaatcctcaaattctaaaaggaaaaaaagttatgctcaaaatttcatttttattaaaaaaatttggttaaatctggtcaaactaattattcaag

SEQ ID NO: 7925 - DNA, 436 bp, Triticum aestivum
  Clone ID: LIB104-034-Q1-E1-G12
atcccgagtcgacggggtgatcctatggctcatcttgtcaagcgcaaagatacagactttcttctcaatgacttgggagatgatgaaaagatgaaggaatctggatttatagttcctcaaaatgtacctgctcacagctggctgaagcgtggggtagatcctcctccaaaccgttatggcataaaaccaggccgtcattgggatggagtggaccgcagcaatggatacgagaaggacatgtacaagctaaagaatgacaagcaggccacggagcaggaggcctacctttggtccgtcgcagatatgtgagcgccgcagctgtcccaagaacatgtccgatggcatgctgactggatcagttgctgaggttgcccaatgtgcctgaaaggaaaggaagcgatgcccttgaacatcatttcttcgaacacatgatgac

SEQ ID NO: 7926 - DNA, 304 bp, Triticum aestivum
  Clone ID: LIB104-034-Q1-E1-G4
tcgacgggtcctccttatgagtggcggtcggggacgagcgatggtcttttcctaccaatctacccccctaggagcatgcgcgtagtgctttggtttttgatgacttctagatttttgcaacaagtacatgagttcttttgactaatgttgagtccatggattatacgcacctcaaccttccaccattgcgagcctctcttgtgccgcacaactttcgctggtactatacacccagcatataccttcctcaaaacagccaccatacctacctattatggcatttccatagccattctgagatata

SEQ ID NO: 7927 - DNA, 313 bp, Triticum aestivum
  Clone ID: LIB104-034-Q1-E1-H1
ttccaagtccacggggcagaaggatccggctccgacataccactctgaacgcttacaattgctgtgctcatctctgctcttcctgacggcaccgttgtcgtttcaccatagaaggaataccaccacaaggtggatgagataaccatatggcactatcctctgatcacactcactcttgacactcaagcattgaaacatcagtagtttagctcacctctgacatcactgacggtatccgcgaattttccttggaccctatcgtggaaaatgctgtatcatcaaaaatgctatagccaaagtccaaaaattcatc

SEQ ID NO: 7928 - DNA, 428 bp, Triticum aestivum
  Clone ID: LIB104-034-Q1-E1-H10
tctacggggacagcggtaatgatgatgacagtgatgaggacaacagcgaagatgactctggtgatgatggagcgttgattcccatggaggatgattctgatgacagtgaggatggtgatgattcctctgatgatagcgaggatagctctgatgaggaggaagaagaaacacccaagaagcaagagactgggaagaagatggcggctggaagcgtgttgaagacccctgttactgacaagaaggccaagattgcaacaccgtcaggccagaagacaggtgacaagaagggagctgtccatgtggcgactccgcacccggccaagaaggcgggcaagaccccagcaaccagtgagaagtcgcccaagtctggagggtctgtcgcgtgcaagtcgtgcagcaagacattcaacagttagggcgctctagct

SEQ ID NO: 7929 - DNA, 411 bp, Triticum aestivum
  Clone ID: LIB104-034-Q1-E1-H12
taggacgtgcgcaatccgggggactcggacctgcagctggagcggatcaacgtctactacaacgaggccagcgggggccggttcgtgccccgcgccgtgctcatggacctcgagcccggcaccatggactcggtgcgctccggccccttcggccagatcttccgccccgacaacttcgtcttcggccagtccggcgccggcaacaactgggccaagggtcactacaccgagggcgccgagctcatcgactccgtcctcgacgtcgtccgcaaggaggccgagaactgcgactgcctccagggattccaagtttgccattctttgggaggaggcactggatctgggatgggcacccttcttatttctaagattagggaggagtaccctgaccgaatgatgctgaccttctct

SEQ ID NO: 7930 - DNA, 291 bp, Triticum aestivum
  Clone ID: LIB104-034-Q1-E1-H4
cagcgagtgatggcagtaactagtaggaattaagaacaaacctattctatgcaataaaaaattacgacatagtaactaagaataaacctacactatacaataaaggatttaaggtatattgcatccactgggcatcgaagttcgccacttgtgatcataaagtgcaacgaagaagcagattacaaaaacttggcaccattgcagcgtaataaaataatactgaaccgagaccacttccaagatagttcaagaaaggttagccttgccggggaactgctgtgcaagctgctg

SEQ ID NO: 7931 - DNA, 391 bp, Triticum aestivum
  Clone ID: LIB104-034-Q1-E1-H8
cgggtcgacggggcccagtactccgacggcgaggaccagtttgtgccggcttccccgccggtgcggagactgaattctgacagcgtctacgatctgtcgtccatgaaagcagagctctctgtcaagaaaggagggttgtccaagtactacgacggaaagtcccagtcgttcgcgtgcatgtccgaggtgaggtgcctggaggacctgcccaagaagagcccctacaagaagatcaagtcgtgcaggagcaacatcgatctggacgggaaccagaaagcctgccccgtacctggttctcacaacagcaaaggaatggccaagccctctggaagctcttgcgcgaatctgatggcccggaataacagcgcaaacatgctctacaagcctcccg

SEQ ID NO: 7932 - DNA, 458 bp, Triticum aestivum
  Clone ID: LIB104-034-Q1-E1-H9
tcgacgggccgactggaaaaggcacgcttggaagggactcaataatatgcagggacggatattcttagtctcaagcacactacacagttctacagaactctaccttggtgaccccgtatgtcgatgaacacaagaacagtctgcgctccaaacacccggagcagtgcgacgactggattacatgtgaacacgtcaggactttcagcagttggttggaaacacgtctcagaggtgacagcactgtttgtgatgagctgtacttgttgtccaggggaccatcttcgactgtaatgatttggaaaggatacgagataaatgggaatacattttacatgattgaccaagatgaaaagagcaccaaccaaaacagcggtgtccgctttgatgcagcaacctacaatggaaatgacacatattatggttacatagcaaacatatgggaacttgactaacgggta

SEQ ID NO: 7933 - DNA, 263 bp, Triticum aestivum
  Clone ID: LIB104-035-Q1-E1-A12
tcgacggggaaaaatcaagaaaaataaaaataaaaaaaaaaataaaaaaaaaaaaaataaaaataaaaagaaaaaaaaaaattaaaaagaaaaaaagaaaataaacaaacataaataaaaaaagaaataacatcaaaaaaagcgcctgtcttaaagtttccaaccttctttacccttccagacaatttcaacctccgcaaaattttccccacatattcatttaagggaccttctttttacaagctcttgatgggaaaaccctg

SEQ ID NO: 7934 - DNA, 346 bp, Triticum aestivum
  Clone ID: LIB104-035-Q1-E1-A2
acggggttgggtataataaaaactatcacagaaagtgaattggatgctatgatcaatttgatgcttgataattgttttgagatatggaggtagtgatattaaagtcatgctagttgggtgattatgaatttacagaatgcttctgttgaattagcaagtctcatagcatgcacgtatggttaaagttgtgtaacaaatttgaaacatgaagtgtacctggcttgagcatccttatgagtggcggtcagggacgagcgatggtcttttcctaccaatctatccccctaggagcatgcgtgtagtacctgatttttgagtactttcaaatttttgcaataagtatatg

SEQ ID NO: 7935 - DNA, 307 bp, Triticum aestivum
  Clone ID: LIB104-035-Q1-E1-A3
gaaacagaatgggtgctctgtttctcacatcgagtgctctgtcgagcagaactactgatcgtgatcgccccgagcacgggcggggtatatattgaccatcgagtgtcatgttgtttcgctgtgctggggttttgttgtcggggttttgtcgtcagatttcaccagctcgtttctttctccggttctttgtttctttcacacggtaaatgcagctaccactcgattcttggcgtttgttgtttgtaaagaagatcgtagcttgtaagtaaaatcgtttgcagtgtaaaatgtacaaaggtagcatggg

SEQ ID NO: 7936 - DNA, 345 bp, Triticum aestivum
  Clone ID: LIB104-035-Q1-E1-A5
gggccgacgggttagtgaatgtgccatgtagaaactacaggataacgtatggtgatagttaatttgatgctgctgaaaaacagaatcgttatgcgcacgattataattttagtaatttacagaaacgtgcgtttgcaatgattcgtttctcggtagatgaatgtacaaattatccaggacatcctagtttggtaggattttttaagttcgagacgtttgcgtgacatagagattgctacagactgttctgtttttgacagattctatttttcgtgtgttgtttgcctattttgatgcgtctatggctagtacgtaagggtaataaacatacagaacttggaatac

SEQ ID NO: 7937 - DNA, 441 bp, Triticum aestivum
  Clone ID: LIB104-035-Q1-E1-A7
cccgggccgacgggaaagaaaatgtgtgaagttacttgtcgtggaaattgtgaggaaaccaataaaaggcagaaacaaagaaaagggcattctggcgaaacagctgcaggaccaagggaaagggaagtgaatgttacggatcagttcctaccagatcaaccaatgcagggacattatgtacttggccacaactttggtcttggtacctcacagaaccttcgtgatgatttgaaccattttggtcaggcttctgcagttccaaccctgcaacagcagccattccctgggaatggtcaactaaccgaaacccaagcctatactggtgacatgcacgcattgcaattcatggagacgaatccccagatcaaacatgagaatggagaagagggtcagtcgtcgataccggtgtgggattttctctgatgtatgacttcacattac

SEQ ID NO: 7938 - DNA, 438 bp, Triticum aestivum
  unsure at all n locations
  Clone ID: LIB104-035-Q1-E1-B1
aattccaggtcgacgggccaaaaaattccattgaagaaatgaccaattcccctaattctcctgacaaaggcaagctgttgagaataaatgacaccggtgcaccttcatcaagtacgagggcaagagttgaacacttcccaaaagagtggttgggtgtaaaatctagtgctctgacccaggtaaattttgcatcctccttgcatgcatgaaagcggtcatctgagaaccttgaataaactgcaggcccagaaattgttgtgtatatccttggtgcatacatgagctgaaacaaatattaaattaacattagtcaagataatatatattttaccaacttcagaattataganagaatttaaagagtgttgcgcctcaacaacttatagtctaagaagtatgacaatcagtaaatttagaaaagtaacgtgatgtgtattc

SEQ ID NO: 7939 - DNA, 437 bp, Triticum aestivum
  unsure at all n locations
  Clone ID: LIB104-035-Q1-E1-B3
aagaattcncaggtcgacggggtctagcagaacatctctcacagattttgccactgattcgtgagtggggaagatatagatgccaggcgggatatggtgagatacaatgccgatgtctaacgacagcagtgggtcgagcgacacgggcttctgtccagcgacgccaagaaagaagcggtaatgacgggcgccgaccagtctacgcgtattatggtcttacagtccaattttgtgtttttcatatcaacatgattgttttaccgtcaattttctgaatattgttagtgactaactatttcctaattttgtttatttaggttgaatgttgtttcattccccacgcggctgaatccaactcggtctttatcctgccttggagttctctctcataactgaagccacgaggtattcgatttatcggatttcgagctacctgc

SEQ ID NO: 7940 - DNA, 392 bp, Triticum aestivum
  Clone ID: LIB104-035-Q1-E1-C1
aattccaggtcgacgggggcgaccggaggaggaagaagaggagcaagatgtcgtcggtgttcagcggcgatgagacggcgcccttcttcggcttcctcggcgccgccgccgcgctcgtcttctcatgcatgggggcggcctacgggacggccaagagcggggtcggggtggcgtccatgggggtcatgcggccagagctcgtcatgaagtccatcgtgcccgtcgtcatggcgggtgtgctcggaatctacggcctcatcatcgccgtcatcatcagcaccgggattaaccccaaggccaagccctacttcctcttcgacggctacgctcacctctcctccgggctcgcctgtggcctcgcggggctcgccgccggcatggccattggcatt

SEQ ID NO: 7941 - DNA, 365 bp, Triticum aestivum
  unsure at all n locations
  Clone ID: LIB104-035-Q1-E1-C2
gacgggcacccgcaccctctcaccaccatcgccaactcgccaccctaataaaaaggggaagcatcgtcataaaaagggaaaggcaaaggataagtcgaagcgtcacacatacaaagaggcaactggcactgatgtggcttcagatatccgagaaaacggcaaggaagaggctgtgatacgcatcgcggacgacggggaatgccgcaagagcaacaaagggaanggccgccatgangacaagaacaacgtgaatgtttcaatcgtttccggcagcatagagaacggtgctggtgacgagcatgccaacaagtcgggctcaatggcaatgaaccctcgttcggaaggtgccaccgacaaactcaatg

SEQ ID NO: 7942 - DNA, 245 bp, Triticum aestivum
  Clone ID: LIB104-035-Q1-E1-C5
agcatcgagcgatagcacacggatgtccagattgctcagatcaacgacaaccattatctcctacggtaactggaaccggttcatcatatgcaaactctacgacaacaccgcaaccaagacctacggtcagttcatcataccggcgctcttctggatccatgctaagtcttcttacggttcagctcagatcacttcgaggttgcctcctacagtctatcagcgggccttatattccactcttttaa

SEQ ID NO: 7943 - DNA, 201 bp, Triticum aestivum
  Clone ID: LIB104-035-Q1-E1-D6
cccgggctgacaagggtatgataaaggtagtgtatcatacttgaaagatgaactgtacgtggcttgtgcatcggtacaattggcggtcggcgacgagctacggcatttcattaacagtccatcgcctgatgagcatgcgcgtcatacttgacttgggatgaattccagtgttttgcatcaagtatagcatttctctggggg

SEQ ID NO: 7944 - DNA, 444 bp, Triticum aestivum
  Clone ID: LIB104-035-Q1-E1-D7
cggtcaggacttcccgggccgacgggtcctttagagtacgaggtagttttattttgaataaataggtgaactctcatgcttcacttatattattttgagagtcttaaacagcatggtaatttgctttggttatgaatttagtcctaatatgataggcatccaagagggatataataaaaactttcatataagtgcattgaatactatgagaagtttgatgcttgatgattgttttgagatatgaagatggtgatattagagtcatgcttgttgagtaattttgaatttgagaaatacttgtgttgaggtttgcatgtcccgtagcatgcacgtacggtaaccgttgtgtgacaaatttgaagcatgaggtgttctttgattgccttccttatgagtggcagttggggactagcgatggtcttttcctaccaatctattccccta

SEQ ID NO: 7945 - DNA, 424 bp, Triticum aestivum
  Clone ID: LIB104-035-Q1-E1-E3
gacgggacactaaaagtcaaaaggtgttacatcacctcaacttgggcccattggccttgtacgacctagatttagttttaggctgccttgggacgtcctcccacatccttggccgccaccccttcctcctatataagtagatccatctagtagcttttccttgggatttgtttagttaaaagttagccattgcaacttcgtgtacttcgtttgtgtccaacgaccagaccaagaccgcttccggatccccaccattatcaatacttcatatatattcgcaatactcagattgctttatcatattcttgctcgttcttcgattgcttgcaggaatagaccttcgtggtcaggttgatcgtgctccagcgtggtcaataacctctcggagttggtttagcgattgcaaaggcgcaacgtcgtgcac

SEQ ID NO: 7946 - DNA, 448 bp, Triticum aestivum
  unsure at all n locations
  Clone ID: LIB104-035-Q1-E1-E4
attccaggccgacgggtatatgcactagcttaatggctttaaagaaagcgctgccagggagacaacccggaagttttagggagtcatttatttctgttgagtgctttcatatagtttaaaaacaacaaaaataaagaggggaacccaaaactttttcaaaaagaaaagccaaagtgagaaagacaagcaatgtgtaaaatggagagacccctgaaactgtgtacaggcacacaacaactttgagaaccgagataacagaaacttttcaacaaaaataattacccccgtgtacaattccattgtattataaaaataatgtgccagggtttgcctttaggatgtttacatttgcttgatggtttgtacggtgcaagacagaaactttggctgtantgcgcgattttacatttttagctggaacgtcaaatggttctgattctttttgcac

SEQ ID NO: 7947 - DNA, 379 bp, Triticum aestivum
  Clone ID: LIB104-035-Q1-E1-F7
ggtcaggacttcccgggccgacgggaccggcagccaccgagcctctgaaggacgagctctgagcatcggtctgtctagcagcagacaggtaaaggagggggaaacatgttttggcaaggcagcttccaacgccagattttgcgagggggggacgatagttggtcgttggatgtgttggccccggttttgcctgattctgtatcccgttgcgagaaatactgtaacaaatccgtcagtggtgtacctagttaaattatcttcaagtgacagtagaaatggttcgtggagagctttggtaataaatggcgcttctgtgcttggaaaagtgacctattccaacaagacacgaaccggatgctcaataggatataggcacaca

SEQ ID NO: 7948 - DNA, 281 bp, Triticum aestivum
  Clone ID: LIB104-035-Q1-E1-G1
ggtcgaggaccagcgatggtcttttcctaccaatctacccccgtaagagcatgcgcgtagtgctttggtttttgatgacttctagatttttgcaacaaatatatgagttcttttgactaatgttgagtccatggattatacgcacctgacccttccaccattgcaaccctctcttgtgccgcagaactttcgccggatagtagaaccccaccatatatcttcctcaatacatgccaccatacctacctagtactgcattttccatagccattctgagatat

SEQ ID NO: 7949 - DNA, 344 bp, Triticum aestivum
  Clone ID: LIB104-035-Q1-E1-G11
ggggatcactatgatgagtcggattacgaggaagaagatgaagaggaacgacgatgacgacgaagtagtattagtactcgatgaggatctagatttagatgacgagtctgacgacgaatacgaagatgatcaggacgaggaggacgaggagtaagttcaataactgtaagactactaacctgatgaagcatattcagatgtcgaatactaacaccattcatatgcagacgattatgtttatgatgaacatgacttttgcatcaagggtccttcatcggccgttattagctgcctctctttacgatcctagcttaccttccctttcttgcgatttcataactctt

SEQ ID NO: 7950 - DNA, 396 bp, Triticum aestivum
  unsure at all n locations
  Clone ID: LIB104-035-Q1-E1-G4
atccaaggccgacgggactctctacttttgcttcccactgatattgtggtggctgataattttgctgcagatgctgagagcaagattgttcctgcctctgctattcctgatggttggatgggtcttgacgtcggcccggattctatcaagaaattcagtgaaactttggacactaccaagactgtcatctggaatgggccgatgggagtttttgaatttgagaagttcgcagctggcactgatgcgatcgcgaagaagttggctgatatcacagcaaaaaggcgtgacaaccatcatcggcggtggcgactctgttgctgccgtcgagaaggcanggttggtgagtaagatgagccacatttcaaccgggggtggcgcaagcctggagctgttgga

SEQ ID NO: 7951 - DNA, 449 bp, Triticum aestivum
  Clone ID: LIB104-035-Q1-E1-G5
ggtcaggacttcccgggccgacggggagcacaagaaggacggcgagcacaaggagggcatgatggagaagatcaaggacaagatcagcggcgacggccacggcgacggcaagaaggacggcgaccacaaggagaagaaggacaagaagaagaagaaggacaagaagcacggcgagggccacaaggacgacgacggccacggcagcagcagcagcgacagcgacagcgactgagccagctccggccgcgctccggcagcagcgtgcagtgtaggcgagatcgatgaacgcttgggagaagtgtggcatacatatatgttgcagggtttggagcgtgtggtagcatatgtatgtaatgcgtgacatgtctcatggatcttgtgatgtataataattagccggctgcactgcactgcacggtgcttgtaataataacgttaatgaatcatgt

SEQ ID NO: 7952 - DNA, 442 bp, Triticum aestivum
  unsure at all n locations
  Clone ID: LIB104-035-Q1-E1-H1
attccaggccgacgggacaagcacaaganaaatgatgccctgcccaaagaagataaggatcaacttgcagaaaatgctcaaaagggccatgcagagccaaaaccactgcctagcttcaagaattttgtcgtggaagaggaggaagggtcaggaggttatgggatcgtttatagggctcggagaagcgaagatggaaaagtatttgccataaaatgtcctcgtgagaaagctcattcacatcatgttgacaatgaacgaaagatgttggaacgatttggaggcaagagttttgtgattagatacgaaggctgttttaggagtggtgaactagactgctttattctagaacatgttaagcatgacagaccagagattctcannagagaaataatgtctttgagttgcagtggtatgggtattgtctgttcaaagctctttcaag

SEQ ID NO: 7953 - DNA, 443 bp, Triticum aestivum
  unsure at all n locations
  Clone ID: LIB104-035-Q1-E1-H2
ggccgacggggtgtgtaagtgacatacatctacatgctaaatagggttttcacgaagagattgttcatgcgagataaagagcgatgtgcgggccttgaggtgggtangggccaggtgagggtgtcaaaatgtgtgcattgatgcatgtgttacatgcgattgtgtgagggacggacgaatcgagagagatggttgttgtgttatggatgctcctctctgtctctctctcttgcacacacacaagtacaaatagaagaccgttctctcatgtatacacaacgtatcgacatctctctatgtctcactcatgcatgatcatttgcacattcacacctctctatgtctctatcacacacacagtctccacattgcccttccgccacaacacacatatggacacatacacacgttctctctcagtcacacacacaaaatcagtatta

SEQ ID NO: 7954 - DNA, 301 bp, Triticum aestivum
  Clone ID: LIB104-035-Q1-E1-H3
attccagggccgacgggtccataattattagctagatggatcctccccccttttgggattccaaaacaaggttctccccctctcttatggaaatcaattcgatgtaaccctttttgcggtgtgtttgtcgagatccgatgaattttgggttaaggatcaagtttacctatgagaaatatttgaatctcctctgaattctttaatgtatgattgagttaaatttgcaagtccctttgaattatcagtttgttttggcctactatattgatctttcttgccatgggaaaagtgcttacctttg

SEQ ID NO: 7955 - DNA, 442 bp, Triticum aestivum
  Clone ID: LIB104-035-Q1-E1-H4
gacggggcaaccactacatcaagccgccgaacctggcggcgaagctgatcacgaagcggctgtacgcggaggaggcggagtggaagaactgggtgtggcactcggagggggacctgatgctcaacgacgccgtcttcgccgacagcggcggccccaaccagaggaagttcgagaaggatgacctcatcccgcccaagccgggatcgtacgtcaccaggctcacgcgcttcgccggctgcttgccgtgcaagcccggcaagccctgctaaaccttggtggccccgccggccggccggagccgatcccttccgaatcttcaattctatagctttgttcaattcttttactcaaagattcgtgcatgtattactaggacatttgagtagtctacggggttcagatcagagggccctgtaggttgtccttgtacgtgcattcgccg

SEQ ID NO: 7956 - DNA, 445 bp, Triticum aestivum
  Clone ID: LIB104-035-Q1-E1-H6
ttcccgggccgacgatatcatagacgcgtcccgtccatttgctggatgacaactgcacgaacgctgggccgacacgtggatctgctagcgaatgagaattttacatgtggaaaatccccattggttcgggctgttaatgggttatcggatccaaagtggaacccaatagcttaacaacgacccgttacgatggatgccacgtgtcggtcacccttgacgaaagcacttctatgacgcgtgatttatcatcatggaagtggacacttccgttatgataattttggtaatgtcatggaacacttctacgacagcacaagtatgactatcttgatcctgtcataaaatcgtcatggatttacatgcatgacagaaaacgtgacctactgtgacaaacacgtatcaacagggaagtgtattttttgtagtgcattgacatggtataggc

SEQ ID NO: 7957 - DNA, 345 bp, Triticum aestivum
  Clone ID: LIB104-035-Q1-E1-H8
tcccgggcagacgggaagaaaaatgattaacacatgcgttgtgtttataatcaaaccgcaactaaaataataattattgtaagaatgtatacttggagcaatagatattaaatgttacaatggtgtttctcacggttccttttccaacattatttgtgtgtgcatgtgtgttttgtaaaaaaaaaaaaaaaaaaaaaaaaaaaataaaaaaaaaaaaaaaaaaaacaaaaaaaaaaaaaaaaaaaaaaaaaccaaaaaaaaaacaaaaaaagaaaaaaaaaaacgggccccccaaaaggttccaatctaacttacccttgaatgcaatttaaaacccctccaaaa

SEQ ID NO: 7958 - DNA, 418 bp, Triticum aestivum
  Clone ID: LIB104-035-Q1-E1-H9
tcgacggggcctaacgtgtagtaatattgtacttgtacgtaccaaatcaattcgcactttcctcaaccaaaaaaaaaaattgaaagcaataagaggcaatggatatcgtttcgtccccaaaggtgggacattccctaccgaaaaccatcatgcttgttgtgagaagctccggtttgtgagaagcgtatacccaaacctgccccaaatgggacaaaatttgtaccacggcatgttgatgccgctccatgatagcatgccaagtttcttgaatttcagatgacttttggatttacttgaatttaaaaaccaggcatctcaatgttttgctggcaatcaacggtgccctggtgttcgaaattcattcccatttcttgcatgggacctaagcatgcacccaaggacacagatttggtttttc

SEQ ID NO: 7959 - DNA, 196 bp, Triticum aestivum
  Clone ID: LIB104-036-Q1-E1-A12
ggcataaatttgctgtcaacgcaacaactatgagatgactgtatcttccatactacatgcattataggaagttcccaaacagaatggtaaaggtttatactcccccaaccaccaacaagcatcaaaccaaggcttgctcgaaacaacgagtgcctccaactaacaacagccctgggggagttttgtttaattattt

SEQ ID NO: 7960 - DNA, 443 bp, Triticum aestivum
  Clone ID: LIB104-036-Q1-E1-A2
gtcgacgggacccttgagagccggacacactggtcgaacatataaagtttgatcatggttatacctcgaagagtccagcaattgtcaatctacttgagatcatgacagaatttactccggagcaacaacatgcattctgccagtttgtgactggtgctcctcggcttccacctggtggcttagcctccctaaatcctaagctgactatcgttaggaagcactcctcgactgcggcgaatacttcaaatgcagctggagcagcagagtctgcagatgatgatctgcctagtgtcatgacttgtgccaactatcttaaacttccgccatactcgacaaaggaggttatgcacaagaagctgctttatgctatcaacgaaggccaagggtcgtttgatctttcatagtgggttcaaaactaacatacagatggttggtgcacatgt

SEQ ID NO: 7961 - DNA, 440 bp, Triticum aestivum
  Clone ID: LIB104-036-Q1-E1-A3
gattcacgggtctccgggaattgagtaaacctctgcactttgggggcaaacaacttcctaactaagaggaaggctaaccctaaaaacataaatccttgaagccccaacctccgttactagtttcctacaaagctctctctctctctctctctctctcaacgctaaccctaccctccacacgaacgctctgccttcactggacaagtccgcctccgttgccgctagctattcttctagtgcccggaccggtgaccatcccttctctgataatgtggaacagatatgttagaagctccaaaaattgaatgtgttgcacgagcagcgagcaccacacttgtgctagtgcagcttgtgggacgggacagggatccccgcaagaataaattactcaataggtagcggggacacggacgagaatgagcagcggacatagatgagtt

SEQ ID NO: 7962 - DNA, 406 bp, Triticum aestivum
  Clone ID: LIB104-036-Q1-E1-A4
gtcgacggggtgaagaaagagaacaacaacatgcagatcgagctcaggcatatgaaaggcgaggatgtgaactccctgcagcccaaggaactgatcgccattgaggaagctctcacgaacggccagaccaacctcagggacaagatgatggaccactggaagatgcacaggaggaatgagaagatgctggaggaggagcacaagctgctggctctgaggatgcaccagcaggacgacctgagcagcggcatgagggagatggagctcgggtaccatcagggtagggatttcacttcccagatgccgttcaccttccggctgcagcccagccaccccaacttgcaggaagacaagtaggccaccgaatcctgccacggcctgtgtcaactgaagctcctctacctgc

SEQ ID NO: 7963 - DNA, 439 bp, Triticum aestivum
  Clone ID: LIB104-036-Q1-E1-A5
gggtcgacggggaaccatagcatcattcgacacacatccatcgtccggtcggatgggaatggattctggagaggcgacggcaggggtctctgcttcctcccccggtctcaattttttggctcgagcagtagtttgtctacactccgattgatcgatcgatccacacgacgcgccatgtgtatatgttacccgcaccaacgtccctctctcccaagtggacatagtgtggagctcagctgtaaatatggtgggacatttgtgcttcggcctcctgcaaaagggatgagccgtgcggcagatgcgattgctgttttttcatcatcttcttcttctctctgttttagtttcaatcactggacgtcaccatgtctgacactctgaccgaaactgtgaattgtcaaaagaacgaaatttggcggactggtaaaattaatctggg

SEQ ID NO: 7964 - DNA, 378 bp, Triticum aestivum
  Clone ID: LIB104-036-Q1-E1-A9
ggcatgggcggtatgcctggcatggaaggtttgggcggcatgggtggcatgcccggcatggaaggtttgggtggcatgggtggtatgggtggtctggctggtatgatgggtggaatgggcggtatgggtggtatgggcatgccgcctggtatggaaggtttgggtggtatggggatggatgattttgaggatgagagtgacgacgaaggagaagtgtcgaaacctcaagacgcagggaagtctgatgctgcggaaatctccgaggtggaaggcaaagctggcacagctgctcagagcaactgaaggctttctactcaataatccctactcgactgtatcctagcgtttttttatcaacgtgctaaactgaaggacaca

SEQ ID NO: 7965 - DNA, 445 bp, Triticum aestivum
  unsure at all n locations
  Clone ID: LIB104-036-Q1-E1-B3
ggtcgatgggacgccccaggttgactcatgtcaatggcataatcaactagcgagcaataataataaatctcagatgacaacactttctcaaaacaatcatgatataatataacaagatggtatctcgctagccctttctgagaccgcaaaatataaatgcagagcacctttaaagatcaaggactgactaaacgttgtaattcatggtaaaagagatccaatcatagtcatacccaatataaattaatagtaatggatgcaaatgacagcggtgctctcaagctattgctttttaataagaaagtgatgactcgacataaaattaaataaataggcccttcgcagacggaagcagggatttgtanaggtgctagagctcaattttaaagcagagataaataatattttgagcggcataccttcattgtcaacataacaacccaag

SEQ ID NO: 7966 - DNA, 418 bp, Triticum aestivum
  Clone ID: LIB104-036-Q1-E1-B4
ggggttcgctaaaatgagtcataataccaatatgaatttataatgagttcattacagtaccttatgatggtgaattgctttctcatactaacggagcttacgagttttctgttaacttttgtgttgtgaagttttcaagttttgggtaaagattcgatggactatggaataaggagtggaaagagactaagcttggggatgcccaaggcaccccaaggtaatattcaagtacaaccaaaagcctaagcttggggatgccccggaaggcatcccctctttcgtcttcattcatcggtaactttacttggagctatatttttattcaccacatgatatgtgttttgcttggagcgtcattctattttattttgttttgcttgatgtttaaataaaataccaagatctgaaattattaaat

SEQ ID NO: 7967 - DNA, 409 bp, Triticum aestivum
  Clone ID: LIB104-036-Q1-E1-B5
gggtcgaccgcctcaaggagcttcacatggacaagaatgactattatggtggagactccacatcgctcaatctcaaccagctatggaagaagttcaagggcgacgagacaccccctgcaagtataggagccagcagagactacaatgtagacatggttccaaagtttatgatggcaaatggtgctttggtccgtgtactcattcatactggtgttaccaagtatttatcctttaaagctgtggatggaagctacgttttcaacaagggaaagatccacaaagttccctcaactgatatggaagctctcaagtctccattgatgggattgtttgagaagcgaagagcagggaaattcttcctttatgttcaagattacaaggaaaatgacccaagtactcacaaggggct

SEQ ID NO: 7968 - DNA, 393 bp, Triticum aestivum
  Clone ID: LIB104-036-Q1-E1-B6
ctcgtgggtcgacatcaaccccgatgataagtcgaggtaccagaggcactccgccaagtggttcaccggcttcctccgtggcggcgagctgaggccggtggctctccccggccaggcatattcccagtgatcttggcacacttcttcatgcttctgtagcacacggagaggaggatggacggcgaataagcctgggaagatggttgggtgttgtttttggatggtaactgaattttgcttgggcagtagggtttatatacaggtctctgcttctttgggtttgattgttcctaaatgtatatgtctgtgttgatgtgtatgcggaaaatattaatatgtcgatatacaaggtgttggatcaaaaaaaagaaaaaaaaaaaaaaaaaaaaagaa

SEQ ID NO: 7969 - DNA, 423 bp, Triticum aestivum
  unsure at all n locations
  Clone ID: LIB104-036-Q1-E1-B9
gggtcgatggcaatgctgaaatatagtcgcatcaatttctttcgaattaatagtttccttcaatattgttgctatgtactacctcttactaacggataaactgttttaaatagtttccctcaatattgtactagcacacttccagataaactgtactccaacttactaacggatgagctgcactgaacgacggcctaaaggatggtgaggagaaatgataccgtacttgagtttcttctcaggagaaccagttttccgtttacctagttaagatggtcttttattcgtctagaattgtcagcactgtggatggtctttgatcattacattatacggcctcatttttacaaaaactgcgttctgacgaaagccgcactcaacaacccggggtctctcttaatcttangagaacaatanctatct

SEQ ID NO: 7970 - DNA, 431 bp, Triticum aestivum
  Clone ID: LIB104-036-Q1-E1-C1
ggtcgacgggacaccatataatcagtctgctcattgggacgatttcgtgaaattcaaggattcagaattagctaaggaacggtcgagaataaacaagaagaatgccgaaaaaaggataagttccataagctggggccaggtggctacgcggtggcagtgcctaagtgggataagtctgacaaagagatggaggatgcaggtgtcactccggttagtaagagctggccctccaggtgcaggacttggttctatgcgcatggggggagttggacccgaagacaggcaatgtttcgacgaaggcatgtctgaacggagccgacgatgcgctacttgttgcaatagaagaggctcgatcgggggtgttccagcccaacagagagaacgacgagcttacgcgtgccctgggaaatcctgaacacccgggaagaaca

SEQ ID NO: 7971 - DNA, 426 bp, Triticum aestivum
  Clone ID: LIB104-036-Q1-E1-C4
gtcgacgggaactgaaagaagagtatggcgaagtgtatggcttggtaacaaaggctctgcttgaagttaacgagtataaccctagtggccgctatcctgtacccgagctgtggaacttcaaagagaagaggaaagcaactctcaaagaagctgtccagtacgtcctgagacagtggcgcacacagaagaggaagcgctgagcccagatatctaaattcctgtagtgaactagaagtgcgtttctgttattttcctcatgaatgttggtaaacgtttagttgtctaggtttccttggattattcagcctggtgtagcattgacatgaatgctagtacttggagattgtgaatcgccctttcaggataatctttttcgtgccaagctatgtgctagtatgaatgaacggctactagtttgttgattac

SEQ ID NO: 7972 - DNA, 415 bp, Triticum aestivum
  Clone ID: LIB104-036-Q1-E1-C6
gggacaccctatactgactcgtattaacaggctggtaggaaaacacttgctgacaagtatgactatgtcatgcatggaaagctttacaagatttcagaggacaattccagcaaggataaaggacctactaaagtggagatctatgcatcttttggcggcctcctgatgttgctcaaaggcgatccttcaagtgctgctaacctcgagctggatcaaaggctgttcctcctcatccgaaaggtgtaagcgtgtaatctaccggataaccagtgcttgtagttcactcagggctataccaagcctgtgattgtttggatgctaatcgtcctgcacccttatgtactcttttggcggtaatatgactagattggtaccattctctgtagcttattcctgttcccctggagcgcattat

SEQ ID NO: 7973 - DNA, 448 bp, Triticum aestivum
  Clone ID: LIB104-036-Q1-E1-C8
ctcgtgggtcgatgggcatccatagattaattcgtaatattttaagagcccccaaaacacaaagggattggcggcccgcgaccaaggatcgaaaacagtgtcacgggtatcccctgccaacagattcccttcactatcgcacgataatctctactgtacaattgcaccatagacccagactacacgaaaaatcctagtcctgcctgaagtgggagtgaagaacggatgcagttgggcacacaaaatatgagttattcttttttccttttagtccttttctgcattgtcatctttcttttgttttcttttttgcgggaaacttttttttcatattcatcattttcatttttttccttttaattttatttcttatttatttgtctttctttcttttttatttccatttctttcttaaaagtaccatttattttcaaatattttgacattt

SEQ ID NO: 7974 - DNA, 373 bp, Triticum aestivum
  Clone ID: LIB104-036-Q1-E1-C9
gggtcgatggcgggcgtctagaatgactcctactaaggcaagggccctgaaggtccacagcgaggccgagcgccggcgtcgggtgaggatcaacgctcatctcacggcgctcaggaggatgatccctgataccaagcagatggacaaggccgccttgctagccagggtggtggaccaagtgaagcacctgaagaggagagcatgcgaggccgcacagcaaacgccggctgtcccaccggagaccgactaggtctccattgaattctgcgccggagacaatgactccagactgtacatgaaagcctcggtcagctgcgacgaccgcccggacctcgtcgccgggctcatccaggcgctccatggcctcaggctg

SEQ ID NO: 7975 - DNA, 438 bp, Triticum aestivum
  Clone ID: LIB104-036-Q1-E1-D1
ggtcgatgggtctcgctatagagagtcattatatgttagagaatcttcacatagttgcataattattcgactactcattgatcttcacttatatctttcggagtagtttgtcttttgctctagtgcttcacttataacttttagagcacggtcgtagttttattttgaagaaatagatgaactctcatgcttcacttaggttattttgagagtcttaaatagcatggtaattttcttaaaatcataatatgctaggtattcaagaataataaaattctcttatgagtgtgttgaatactatgagaagtttgatacttgatgaatgttttgagatatgaggatggtaatattagagtcatgctagttgagtagttatgaatttaaagaatacttaaagtttgtgattcccgtagcatgcacgtatggtgaaccgttatg

SEQ ID NO: 7976 - DNA, 434 bp, Triticum aestivum
  Clone ID: LIB104-036-Q1-E1-D11
cacgggtcgacgggatatgtgataacttgtcactgaacacagaacgttctttcttggtttgcatttggtgtaaccccccttgattgttctttttcctctgtcttataatcctctgattgtcaatccagtcatatattgatgatgtattgatcattgtttatcagaagttttctacacattgctgctggatagagcatctattgcaactacaattggcgatatctacacagatctatacataaaagataataggaagtaagcttctatagtgtgacgtagaggtattggccatacaccatgaatgatagaggttgtgcagctgatattcatagtttaattacttattcctccaaagagatacatatttttagctataatgtgttaccttgctgacagtacatcgatatattctccaatctggttcaactatgcct

SEQ ID NO: 7977 - DNA, 195 bp, Triticum aestivum
  Clone ID: LIB104-036-Q1-E1-D12
ggacgatggcattccctaaaatgactcgtattaacaagagatgaattggtttgcaacagtacttacagtggtgatttgatttagtacactaacggatcgtaccgacttttctgttgaagttttgtctggataaagtgtccagttgaggaggtctcgatatgaggaaaaggaagaggcaagatctcaagcttgggg

SEQ ID NO: 7978 - DNA, 429 bp, Triticum aestivum
  Clone ID: LIB104-036-Q1-E1-D3
gtccatgggtctcgctaaatttattcataggatgtagaacaccgctgaggagcttgtccgcaggacgagctgctcccgatgctgcatggcaacccagccggatctgcctcgacaggttcgagccctccgtcacgggccccgtgcacatctggcagggtgttgggaaggtgatcaatgtgaacaagatgatcagggccagatggagtgaagatcctaataccggaccagaggccgacttggcaagatcaggaagcagctggaccacaacaaggacgtcggcggcggcttctccgccatgtgggattattctttgacctttcacaattccttcaggcgtccataacatcaagcataattttggtgtttcttaaccttttgcattctactctaatcatttaaattgggcctatgactcagaagttttttttt

SEQ ID NO: 7979 - DNA, 416 bp, Triticum aestivum
  Clone ID: LIB104-036-Q1-E1-D4
gtcgacgggcccatgtacaggcacacgatttaaggatgattccaattacttggccgtttgcagtctgggggcttgatatggttgggccttttaagagatccaaggataagaagactcacctcttggtggcagttgataagttcactaaatgggtagaggcagagccattgagtaagtgtgatgcagcaacgatggttcaattcatgaagaaggtgatcttccactttggctttccacacaacattataacaaacaatggcactaaccactcaaagggtgctatgaaggacttttgtcaacgtgagcatatccggcttgatgtatcattagtggctcacccccaatctaatggtcaagctgagagagccaatcaagagatcttgagaggcatcaagccccggtttatggttccccta

SEQ ID NO: 7980 - DNA, 289 bp, Triticum aestivum
  Clone ID: LIB104-036-Q1-E1-D9
agacgaaaatcacaaggaagaacacattaatcgcgccacgggccttggtcaaaccacttgggtggaacaagaaagatgaaaaaccaaatgttgccgccggaaaactgaagtccaatgaagagttcaaaaatctggtgcttaagaagtgatgtccgtaggcaggttagttcgtcggtgtcttcacgtcccaccaaggacctctaccttgcacctgacctgtggaatgaatgaatataatgaagtgttaacttgacctttaaccggctaaaaaaaaaaaaaaaaaacaaaa

SEQ ID NO: 7981 - DNA, 415 bp, Triticum aestivum
  Clone ID: LIB104-036-Q1-E1-E1
gggtcgacggggaagaatattgaacctgttgaagcacaagacggtataacaccggataatgtcccagcagaagagataaatgacactgaagccatggagactggagaaatccctcatgagagcacagatgacagtttaacagcaagtgcagcacttcctgatattcaacaagtcccagaacaagaagcagtcgaagataaggcatgcactgacaccacagaaaaccaaggggaacctcaacaaagcattgtttctacttctgctgagcttactccaacagaagaagaaacagcagtagtaaagcatactcaagatacacatgtacagaatgccagcagtgaaccgggaactgacccaaatttgcttgtccaatcagcacatcaatcagaattggctgaagacagcaagggtcaac

SEQ ID NO: 7982 - DNA, 332 bp, Triticum aestivum
  Clone ID: LIB104-036-Q1-E1-E10
gggtcgatctcaggtacaaaatcgtattggtaggcctgcactaccacctcaggtacgagatgatctgcatattcctaaactgaaattgaatattccaccatttgagggtagatatgttcctgatatatatcttacttgggagttagaaactgaacaatgttttacatgtttacaatatcgcgaggagagacgggttgctgctgctgtttgtgctttcacgagttttgcatgtatatggtggtctgaacattgtagattatatccgattcgaactacttgggctgcgttgacaactgctatgcgtacgccttgagttccaccatattatcaac

SEQ ID NO: 7983 - DNA, 398 bp, Triticum aestivum
  Clone ID: LIB104-036-Q1-E1-E2
attctagagtcgacgggaccacacacactgccgccacggccgtgaccgccccagtgacgtcgtcggtgccagcggcggtggtgctcgtgtccgccgtggtctcgttccacctcatgctacacgcagtggacctgtcgtccattagacacggacggcacgcatgtaattgacacaccggtacgcgtgacttgctcgccccgcagcacttatacgatacacatcagaccgcgaagagaacactcctcgtgaacagtgccactatcattgcagactccttgcccgatactcctgttgcggtggatagtatcgtagtgtttacatcatcatggatcacaactgacaccttctatcagctaaagagtatttgcttagctgcttagtccttcagtcccatcctc

SEQ ID NO: 7984 - DNA, 386 bp, Triticum aestivum
  Clone ID: LIB104-036-Q1-E1-E8
taattagtcttattatgtcatgggctccaagtcgcaagcgaagaccaaggccagggaagggcttatcgcaaaggaggctgcgcagcggatgaactaagtttagcattgttgaaccatatctattcctcatccttgagtagtgttcaagcatactgtggctgtttggctccagttttggaagtcatttttgtttgtctgagacatcttggaaagaacagtgtaagaatgaagtatttctgtttaatgccagttagtatttttgtcgaaaaaaaaaaaaaaaaaaaaaaaaaaaaaaaaaaaaaacaaaaaaaaaagaaaaaaaaaaaaaaaaaaagacaagaatcaaaacaacccaccaaaaaagggaaacacacgggaacccagag

SEQ ID NO: 7985 - DNA, 398 bp, Triticum aestivum
  Clone ID: LIB104-036-Q1-E1-E9
agcactatagtgaatcatatgaagaaaatgacccaggagcaaatcttagcctttgagcaaagcggagagattttgttccttggtcattgccttacgctagatgatattaaggtggtccgacagttcaagcgtcctgtggatgtatcagagaaggaaattgatgccgcgggagatggtgatgtgttggtcattttggatctcagagctgatcaatcattgattgaagctggagtggctcgagaggttgtaaacagaatccagaaattacggaagactgctcagcttgaacccacagacttaattgatgtgtactacgagtctgtagacaacagcaatacacttgaagaaattttgcagtcacaggatcagtatattagggacgtgcttggtaattcgct

SEQ ID NO: 7986 - DNA, 419 bp, Triticum aestivum
  Clone ID: LIB104-036-Q1-E1-F1
ggtcgatatcgctctctacaatgagtcgtatgatgggacaaacaaagctgctcatagcaccacatcgctcaatacaaagaggcttgatgatgatacagagaatcttgctcatgagcgtgtgccgtcagacctgaagaagagcattatgcaggctagaacggacaagaagctcacacaggcacagcttgcacagctgatcaatgagaagccacaagtcatccaggagtacgagtcaggcaaggctatcccaaaccaacagatcatcggcaagctggaaagggctcttggcacaaagctgcgaggcaagaagtgaagccgcgtgcatctgacaggagtcgaggctttcaagagagcttggctgggcaagtttaccgctaaataaagcttgtctactaaatcatgcgacttaagaaaaccct

SEQ ID NO: 7987 - DNA, 426 bp, Triticum aestivum
  Clone ID: LIB104-036-Q1-E1-F11
cgggtcgacgggcataaaacaacatcatggtagtactgctgtaaacaacgtcaatcagggttagtttcattcaaatcatgcaagttagagtccaaaacaagggcaaaagtgtttggaaaagtagatacgttggagacgtatcaactcccccaagcttaaacctttgcttgtcctcaagcaattcagttgataaactgaaagtaataaagaaaaacttttacaaactctatttgctcttgttgttgtaaacatgaaaagccagcattcaggtttcagcaaatattatgaactaaccatactcacaataacacttaggtctcacaattactcatatcaatagcataatcagctagcgaggcataataataaaactcggatgacaacactttctcaaaacaatcataacatgatatagcacaatggtat

SEQ ID NO: 7988 - DNA, 401 bp, Triticum aestivum
  unsure at all n locations
  Clone ID: LIB104-036-Q1-E1-F2
ggtcgacgggtggccctagattgaatcatcatatcattgctacctcgaagcatgactaggataccccactcatcaataagaacattggaggtgcaatgctaaatgtttcttggtcagttatccaaacaccgttgtatgggtaacatcttgattaatccttgcctcttacctaaatggttgggtactttctctcccaccctgtatgccatgttctgcttgtacatgggaaggatatactcctaataatagtgtgtaaacacaattttcctttccattgttctgtttaatcttataatcgtgttttcctttccattcttttgtttaacctttcctgaatctaacttaactgagcagagataaatccctgcttaagtangcaccttgttgtaccactctgtctg

SEQ ID NO: 7989 - DNA, 357 bp, Triticum aestivum
  Clone ID: LIB104-036-Q1-E1-F3
ggtcgacgggatgcgacaacgggcatctccagatcgatggaggacgggagcctgagcaagcgcgagaaccaacggtaccgatgatgatgggaatggcacaacgacgacgatgctgccgaaccgccgggacatgatctgagtctgtgcggatcggactgccccttgctagataatgtacgtacgtacgggtaccattaaccaagcatgtcgtgattgcattattttttggcccctgattggatctcatagtacttatgatatacttataaccaactcaacccccctcctccttgctcttgattgtattatatgtgcgagcatcgttctatgacagttctttgatatactcacttgttg

SEQ ID NO: 7990 - DNA, 419 bp, Triticum aestivum
  unsure at all n locations
  Clone ID: LIB104-036-Q1-E1-F4
gtcgatgggccacaccacattgtatcatacgctctttcacacataaacctccttatatcttcctcaaaacagccaccatacctacctattatggcatttccatagccattccgagatatattgccatgcaactttccaccattccatttatcatgacacattcattattgtcatattgcttagcatgatcatgtagttgacatagtatttgtggcaaagccaccgttcataattctttcatacatgtcactcttggtccattgcatatcccggtacaccgccggaggcattcatatagagtcatcttttgttctagtatcgagttgtaatcattgagttgtaaataaatagaagtgtgatgattatcattttctagagcattgtcccaagtgaggaataaattaanaaaaagagagaaa

SEQ ID NO: 7991 - DNA, 380 bp, Triticum aestivum
  Clone ID: LIB104-036-Q1-E1-F9
atcgtaatacggggatgagcgatggtcttttcctaacaatctatccctcttggggcatgcgtagtactactttgcttcgagggctaagtagacatttgcaataagtatatgagttctttttgacgaatgtgagtccatggatatatgcacactcatccttccactttgctagcctttattattaccgcgcaactttcgccggtatcataaaccccttatttacctttcctcaaaacagccaccatacctacctattatggcatttccatagccatttcgagatatattgccatgcaactttccactgttccgtttattatgatacgttccatcattgtcatattgctctttgcatgatcatgtagttgacatcgtatttg

SEQ ID NO: 7992 - DNA, 408 bp, Triticum aestivum
  Clone ID: LIB104-036-Q1-E1-G1
ctcgagggtcgacgggtgtgtggaaatcgagacttataaagctagtgctttgggtttgggatgcatgatagcttggagagagtgttgtatttatagcctggtgatacggatgcatgcatggatgggatcgagctgtttgacgtacgtagtagcttacgtatgtgtgtatgatcagacgtggccatgtgtgattcgattgctttcaaaactgctaggttgtcctctcgatgtatcatttgttttagagagataagacaagatttaagcatgatatggtttatcaattctggagatatggcaacaagttgagcaacacccttgcatgttcatgcatgttacgcaacactgcaataccttgtcatgccacacaatatgggcgcgcatagacaccggaagctaagccgatat

SEQ ID NO: 7993 - DNA, 409 bp, Triticum aestivum
  Clone ID: LIB104-036-Q1-E1-G3
gggtcgacggggaacgcggtcgttcgatgctgagacgccgcggcggcgggagtcggcacgcagcaacgaggcggtcgaggaggcgcggatcaagctgctggagctgcggcaggtgaacaaggtgaaggcgctcgtcggcgccttcgagaccgtcatggacgacaaccaaagccccgccaccgcccgcaagccgcggctcaacctccacgcctgaactacgagtacattccaccagcatgaagctcgatcgcgtgcgcctcctcctttatcccggctactctttaatcacccatcaacccaatttgtcgtcgtcgcacacttatctataattacggtatcgcttatattttgcaaggaggaagatgatggaagggttatcatgatgtaataataataatgatcatggaag

SEQ ID NO: 7994 - DNA, 398 bp, Triticum aestivum
  Clone ID: LIB104-036-Q1-E1-G5
gggtcgacggtgcaccagtgcctgagcatgatcaagggcgtggacaagaacggcgacggcctcatctccttcgacgagttcaaggtcatgatggcctccggcttggccgccaagatggcctgacccgtccatcctcttgttgattcagcgatttcgtccacgcctccctctctccttcctctcgcgtgccgtgcggtgcggtgcggattaagtgcgaattaagtgtacataattcaaggattaaagggcggccattagagtagattatttctttcgtttcttggtggtgcgagtaataactagaaatctctcgcgaataactgtgtcgcgaatatcgatctgagatcaaagagattgacgacgcttgaaggggatataaaaagcagtggttgatggtc

SEQ ID NO: 7995 - DNA, 393 bp, Triticum aestivum
  Clone ID: LIB104-036-Q1-E1-G9
tatactgagtcgtatgatttttgatgacctctagatttttgcaacaagttaaagagttattttggacaatgttgagtccatggattatacgcacctcaaccttccaccattgctagccctccttgtgtcgtgcaactttcaccggtaccatacacccaacatataccttcctcaaaacagccaccatacctacctattaaggcatttccatagccattccgagatatattgccatgcaactttccaccgttccgttcatatgacacgcattacttctgtcaaattgcattttgcatgatcaggtagttgacatcgtaattgtggcaaggccaccttcataattttcatacatgtcgctcttgattcattgcatatcccagtacagcgcccgga

SEQ ID NO: 7996 - DNA, 388 bp, Triticum aestivum
  Clone ID: LIB104-036-Q1-E1-H3
ggtcgatgggtgtcccaagagtgagtcgtatcaactttggatgttttatatgcatttatatgctattttatatgatttttggggactaacctattaacctagagcccagtgccagtttctgttttttccttgttttagagtatcgcagaaaaggaaaattaagtggagtctagttgacctgaaactccacggaacttatttttggaccagaagaagcccacggagtatcggagatggaccagaagagtcccaggctgcccacgatggtgggggcgtgctcacgccccctgcgcgcgccccctgcctcgtggacagcccggagatccaccgacgtacttcttcctcctatatatacccatataccctaaaaacttcgaggagcggaata

SEQ ID NO: 7997 - DNA, 366 bp, Triticum aestivum
  unsure at all n locations
  Clone ID: LIB104-036-Q1-E1-H4
gtccacggggcaccgtatgatcaatgtgatgatggccacatgctaacgtaatcacatccacccgctgctgaaatgcatcagtgagtggcattgcaaacccctgacgcactgctcatcacccatcgagatacagtaccaccangcgttcatataaacatctacactcgttctgaatatcgaattggttcacgactgttatacgtaaggttcctggtaaatctacgtatcattgtacctatttcacttgatacgactgttgttttttcacactgccaccatgccatgtccaagtgaggcacgcagcttctcaaacttgtgttgttgtgccttgtatgctcggatcttaagtacattactttgtttcac

SEQ ID NO: 7998 - DNA, 382 bp, Triticum aestivum
  Clone ID: LIB104-036-Q1-E1-H8
gggtcgacgggtgatccgaaagatgatcgtgatatcaagattaggagggtgaatgttagagctaatcttgatatttgtattagcatgtttgagttttgcatgtagtctagtctagtgtggtgttcgtccgacgaaggcttcaggtgagcccgccaaggaagttagaatccaggatgccgtgtgaagcggcgagcacggcgaaatgccgatggtgctgcgttagaagcggcaagacgtatcaaaggctggagccgtgatggactgcatcaaattgggtccggtgaaccggccggtcgttctcttttgttggactagctgttcatgcgtgagttcgtttagtcctagccgagagtatcgttgctagtagttgatgcatgcatgt

SEQ ID NO: 7999 - DNA, 215 bp, Triticum aestivum
  Clone ID: LIB104-036-Q1-E1-H9
cgcaccaagcagctagcagcatccgcgccgccaccgtacgtcccaccgttgtggccggggacctccacctcacatggatttcgccgtgccgccgccgtcgccttggatcgacaaaggtctgataccaattgttggcgccgcctcctcgcgttgcagcgccgctccttcttctacctcaagctgccttagacaactctcttgaggtttctctcaag

SEQ ID NO: 8000 - DNA, 420 bp, Triticum aestivum
  Clone ID: LIB104-037-Q1-E1-A6
tcgtgggtcgacggggatcgacgaaaatgggtccaatgagatcacggcagtgcagacggcgaggtcggggaggaactagagtggtcagggcgtcgagggggatctccggtgatgatcggtgaagacgaggctgttgcgctggtggggcaggaggggctcttctggttcgggagcttctggggccggacggagcagggcgaccccgtgtcttccgaggatcagatgtacgcaagcttgagcctgccggtagttctagagagagtgcggggttaggcaccgatgatgatgcagtttgatgcaagcggcttgcattgcagcttctaaatgaggtttctacttttccatccggccaaggattttatccagagtagcagctattacatcatttggtcagtgcactgaccccctactgtacatatg

SEQ ID NO: 8001 - DNA, 401 bp, Triticum aestivum
  Clone ID: LIB104-037-Q1-E1-B1
gtcgacgggcatatgcactcctggtacacacactcagcaaaatgaggtcgtgtgcgataggggagcgctcaaatatggaaatacgtataatagagctaaaatatacaatgatagacgcagaattgcttccggtcgcaagtacatctcacacagtcagtccgcgcgaaacgtttccattcgtatgtacatcacaatcagtcgctccaaggaaaacattttcgttcacaagtacatcatacacagtttcccccgttaaatcatttgtgataacgttgacaatgcacacgatattaacaattttaacgtttgcattaatgaatggatcatacattgtgcgtacaagaaactgtatgggaaaggttgtccatcagacacaatttttacttggtaaacgtttgccc

SEQ ID NO: 8002 - DNA, 411 bp, Triticum aestivum
  Clone ID: LIB104-037-Q1-E1-B2
gtcgatgccactgcctacagtgagtcgttctaggacacggcaggccaggagaggtatcgggcaattacaagtgcgtactatcgaggggccgtcggtgcgcttgtcgtgtacgatgtgacacgccatgtgacctttgagaacgtggagaggtggttgaaggagctccgggatcacacagatgcaaacattgtcatcatgcttgtcggcaacaaagctgatctccgccatcttagggctgtatcagtggaggatgccaaggccttcgctgagagggaaagcaccttctttatggaaacatctgcgctggaggccatgaatgttgagaacgccttcactgaggttctgactcagatctaccgtgtggtcagcaagaaggccctcgacataggcgatgaccctgctgctccaccg

SEQ ID NO: 8003 - DNA, 396 bp, Triticum aestivum
  Clone ID: LIB104-037-Q1-E1-B4
ctcatgggtcgacgggcatcacccatcatgagtcatagcatctgcccagatgatcgttgcgacggccacaacgaagtgcatctctcaattccaggatcaacatgctggacgaatccacccttcatgtcaagttgcaacagtgcacgcacacaccagggaggcttctgtacttagggacggtgaatctgcatcaacagtgctggatggaaaatgcacgccgtccttcttccataaaccacgtagggaccttgtattagcctccccatctaaccgtcaggaagccctgacatgccctgctattgctgtcaacaatgctaccctatgtagcacacgaactgaacttaagtatgtcacatggaacttcaggtaccaaagccaacagaaccaatattaatg

SEQ ID NO: 8004 - DNA, 99 bp, Triticum aestivum
  Clone ID: LIB104-037-Q1-E1-B5
attattccctatactcaatcttattatcacgcgaggagcgcgtcagaaaagtctcaggaacgctccgcgcgtgacacttggcgcggggggaactataaa

SEQ ID NO: 8005 - DNA, 417 bp, Triticum aestivum
  Clone ID: LIB104-037-Q1-E1-B6
acggggtggcgaaattgccgtcgccgcaggaaccactgcccgggcaccattccttgccctcccatccggggatcacggtgccggcatcacgggggctctcatcgccggtggggattgcgcggatccagcgagacgacgtcgtttccgtgcatgaggaggcagatcaggatcgggatcgtgaccggtcctcgggctttctccatccggcgagatggcgagtcagattagaggatactcggacacccggccatcggcgcgagggtctgctgtattcttattcaccgttgaggtggacgacggtgactgatctcgagggagacatcctcgccggccggcacctggatgatggtgagcaactggtcgaagattatcttccgagccactgcgttgatccatatgtggtcgctactcactccg

SEQ ID NO: 8006 - DNA, 377 bp, Triticum aestivum
  Clone ID: LIB104-037-Q1-E1-C2
ctcacgggtcgacggggtaccctacaatgagtcgaattaccattggaactctcgttcatagaacatgatcatcggcgagaggttcgcggtcgaccagcacatggatcacttcattgaccacagcatcatatccatcgtgtccatccaggcacggatcgtgacgcaataccctttccccatgcagatgcacgatagccaatcggagctctacccttgaggtcctgcactggcacgatgaaaccgtgcttccggatctcctgccggcagtcagtcaaacatatcgaacgcagctagcgttactccaaaatatactatcggtacgtcgggtcgcagaccaagcagcagtacatcgataacatcatctggaacatccatca

SEQ ID NO: 8007 - DNA, 394 bp, Triticum aestivum
  Clone ID: LIB104-037-Q1-E1-C3
gtcgacggggaacgtgatcatgagtcgcgatgaggaaggcgggcggccggacgccatcatgatcctgacggtgaagcgcgacaacatctgcagcttcatctcggagaccaaccccgggcacgtgcggtcgtgggagaccaaggacagccagctgacgatggtggcggacgacctgaagccgcgggcggtgctgacgtgcccggagaagaagttgatccaccaggtggtgttcgccagctacgggaacccgctggggatctgcggcaactacacggtgggcaaatgccacacgcccaaggccaaggagattgtggagaacgcgtgcgtggggaagaggagctgcgtgctggccgtgtcgcacgatgtgtacggcggggacctcaactgcccgggc

SEQ ID NO: 8008 - DNA, 344 bp, Triticum aestivum
  Clone ID: LIB104-037-Q1-E1-C4
acgggcatcgctatagtaaatcgtaatatatccatacctcgaagattggatcaccaaccacacgcttgctattgacatgggtgctttgtgtcttgctatccatgtgtcaatttcatcagttcggtgctatatcgtatgggtttcacctctagcctatcccaacttgtttggaaccagatgctttgttgttgtcgtccattttgcacacagaccaataaatgatttaacactcgctataacactccacgtgcatcacttatatctttctgagcttgataatttttgccccaatgattcacgcatatctttcatagcaccgtggtggatttgcttcaaagaaacca

SEQ ID NO: 8009 - DNA, 416 bp, Triticum aestivum
  Clone ID: LIB104-037-Q1-E1-C8
ggtctagaagtcccgggtcgacgggcgggcgccctctcaagggggtggatgcggccggtcggcaagacgggctcctgtggtacaaggacgcaaggcagctcgtcgccggcgagttctcgatggccgtggtccaggctaataccctgctggaggaccatagtcacgtggaatccgggtcgctgagcacaacggatcccaagctgcagggcagcttcgtcggcgtctatgatggccatggtggaccggaaacggcacgctgcatcaatgaccacatgttcagccatctgaaaggatatgcatctgagcagaagtgcatgtcagtggaagtaattcggaaggctttccgagcgacctaggatggatttctcctctctagtcagtaatcaatggtcagtgaggccgcaattagcggcggt

SEQ ID NO: 8010 - DNA, 373 bp, Triticum aestivum
  Clone ID: LIB104-037-Q1-E1-C9
accactccctacagtaagtcgtactacagcgagttcgtggcgatcatgacgaaaggggccccgtagggggccaacgccaacaagccgcgcgacatcgtgctctccgggacagcagcttggtccatgaagccggcggtcgatccgcaacagaccagcatgcgatcaaccgtgcgtgcgaggcatctcgctacgaccactattacgagctcatgtacactttgcacaggtcaggtcgagtagcacatctacatatatctaccgtgggattgggactcgacaatgttggtacgctgtcgggcacctatcttcttcgctggttctgctggttcccttgactgcgacgggaattactttagtatgtactgtatccatc

SEQ ID NO: 8011 - DNA, 371 bp, Triticum aestivum
  Clone ID: LIB104-037-Q1-E1-D1
gggtcacccgagaatgagtcggatgactgcctgacgctggggtggcacacgcgcccgctgatcgccacctccgcatggcgcctggccgcgccgtgaccgcgagttttgaacgctgtaagtacacatcgtgagcatggaggacgacacaaccccggcggccgccccggctctccggcgcacgcacgcacgcacgctcttgaagaagaagaagaagctaaatgtcatgtcagtgaacgctgaattgcagcggccggccacgatcgaccgtccggcgtgaagagacggacgacgacgaattccgagccgaccatcccaccggcatgtagtaatgtaatcccttcttcgtccccagttccccaacgcctccatga

SEQ ID NO: 8012 - DNA, 101 bp, Triticum aestivum
  Clone ID: LIB104-037-Q1-E1-D10
tcgtaggtcgatgggattccctaaagtgagtcatcttagcctcgtcattacggtgatgcaatatattgacaaggggtcgcatcttttgtgcttagttttta

SEQ ID NO: 8013 - DNA, 103 bp, Triticum aestivum
  Clone ID: LIB104-037-Q1-E1-D4
gacgggcagtatatgtgcctagttgggctttaggggaaagagagaggagaggctgcgcgcccccaaaaggcctactccgaattcgactatggggactcagccg

SEQ ID NO: 8014 - DNA, 339 bp, Triticum aestivum
  Clone ID: LIB104-037-Q1-E1-D5
gttcactcgtctgatttttcaaaactgttggcacattattgcgaaagacttcatgctactgattcaagctctccacgaaagccggttttactcgtttggggcacttagctcttccataattaccttgcttcccaagaatgaggactccaatgcaccttggagacttcaggccgatcaacttgatacatggaactgcgaaaatctttgtcaaggctttggctactacgcttcactccctactgccttccttaatatcccaagcacaaagcacttttgtctgcaaacggagtatgcatgagaattttaaattcgtgctgaacactgcaaggacccttcaca

SEQ ID NO: 8015 - DNA, 406 bp, Triticum aestivum
  Clone ID: LIB104-037-Q1-E1-D7
aactgattcgtaatagctcatgagacaaccaaccttgagacttggtgtcttgatatactggatagcattgcatgcattgcttgtgagttttatttgaaggttatatttaaagctgtagtgatggatctccttggtgagccacctactgtacagtgccatgtctatgacaagctatgcaacacaagcaatctagtcaaaatgctgtcgattctttttgaagtttgttactgaatgaatacctgaaccaaacggtcatctgcgtatcatttttgttgtgaatcttccccttctgctggaattggtcctgcttcagctgggtccaaccgaagggaactgcaccaacagtaccgacgaaagagaactgaagaaagcagcagcagcagcaaagattccctgtacatactct

SEQ ID NO: 8016 - DNA, 271 bp, Triticum aestivum
  Clone ID: LIB104-037-Q1-E1-E10
accctaaattgaatcgtatgagagaggaggcccggttgcttgagcaagtgatggtgcgatggtgttgttgttcatggagttgctcgcgacgaaactgggcatcgggaaatcatgtaccgtcttgtctggattttccttcgcccagttgatgataactggaaggaagttagtagcaaaatcatttctgcaggcagttacggctgcattgactgcctgctcgagcaactcagatttgtccgcggctgttttttcgcagcatcagcggcgtttt

SEQ ID NO: 8017 - DNA, 413 bp, Triticum aestivum
  Clone ID: LIB104-037-Q1-E1-E2
ggtcgacgggacggacccacatggcctgtggatgatgcaacccgaggggcgcccccagtaaagtaagctaaagatgtaaaaagggatacatgccgcggggacaggcccacggggcctgggaataatgcagctcggggggcgctcccagctaaatggacttggaaaatgtcatctggttttgttgttgaaggagcgttgtggtagctaaaggcgcgcgctaaagaaaccgctcctcatgagccgccaaaacccaaagccctcgggaggctctgggggctcgggtggctccctgaggaccatctctatctccgccaggaccacatgatgcccggcctcctgggtttccaggatgctccgtaggctgcgctggaaagcggctgccatgctcggcaggccaaatggcatgcgaacat

SEQ ID NO: 8018 - DNA, 444 bp, Triticum aestivum
  Clone ID: LIB104-037-Q1-E1-E9
cctgggtcgacggggatgattcaacggattaagacgacgacactgacagctgctcgacgcctctgcccccgccgccgccgcccggtatggagtgggagtacacggacccaatcactatgcgccccttggattttcttccatcttcgttggctgatcgggacgataaagaagtggcctcacaagtcagcatggatgacgattgggtggaaacgaacatagaatttgatggacaggatgaaagcgtctctggcaatgctgatggcatacttaggcgtgtggaattgcatccagcaaagagtagggttatgggtgatgaaaactcatcaatgatgagcagctgggtaacaaaggactcgaactcttcggtgatggcctgggcgactgacaagtcactggtagaaatagccaaggagattgatgagtacttcttgaaagcagccgcaa

SEQ ID NO: 8019 - DNA, 93 bp, Triticum aestivum
  Clone ID: LIB104-037-Q1-E1-F2
gacgggcctaggataaggaaaggtggtcagcccaagcaagtgatcacgaagcggcatcattcaacgagaccgacagccaggagatccacgtgg

SEQ ID NO: 8020 - DNA, 446 bp, Triticum aestivum
  Clone ID: LIB104-037-Q1-E1-F4
gtccatgggccaccggaagatgagtcgtatgaggacgaccgcgctgattacaggaaatctgaacccactacctacatcaatgctcccttggtaggggttcttgcctacttcgttggcaacccaaacccaggccatatcagacactgagcataagcactttgccatgtagatagagaagagtgacagaagctataaataggtacacaggaagcaaataggtttgtgattggatggcactacatgttcataggagtggattgcagagcatgtgttctaccaataatgagagcttatctttcatgatttttcttttgtttgggtttgcactgaattttgttttgtgtgaaggtgtgcacagtgcaatttaactgcactggtgtagtcatgagtgaagaaagcttgcattttgcacaaatatttggtatggaaggtactcctgtttcaag

SEQ ID NO: 8021 - DNA, 401 bp, Triticum aestivum
  Clone ID: LIB104-037-Q1-E1-F5
gggacacccaaaactgagtcgtataaacgacagtaaacgctggattcagcggatccaagtccagtcagcggaagaagccgttcaaaagaaacaatcagggaccgtccagtctggaccgtatactggagcgctctgtcacacccaatatgcgatactatcctaaagagactcgaaggtcccaccaaggatagaaccgcatattgaaacgcttttgcaaggtggatatcattacatcaacattacataatagatggagatacatacaagaggcatcgaatgccatacgaatacaacatcatcatacataagaacatcatccgactacggatgaaacacaaacagaaactcaaatgacatccaccctgctagccccagctgccaacctggaacctattccccga

SEQ ID NO: 8022 - DNA, 424 bp, Triticum aestivum
  unsure at all n locations
  Clone ID: LIB104-037-Q1-E1-F7
ctcgcgggtcgacctcagcggacaaagtgcatcgcatgatggcggagatcgacaccgatggtgacggcttcatcgacttcagcgagttcatctccttctgcaacgccaacccggggctcatgaaggacgtcgccaaggtcttctgaatcagttcatttcacctcagccgtccgatccaggagccgatccatctacgtacggcttcgtatatcaatttcatgcaactacctactccggtcccgatccagcctcagcttcacctgaggccggccctaattttgtttgatcaatttttttgctactagtagtaactagtgatgatcactgttgcaccatttatttattttatatcgtcacaactttccagtgtttcttttctttctctacctttntgtcgatcgtcggctccagctcgatcgaacga

SEQ ID NO: 8023 - DNA, 414 bp, Triticum aestivum
  Clone ID: LIB104-037-Q1-E1-F9
cctacatgccatcgtaataaggcaagcccccccccccttgatcaccagatatcgcctactctcctctatactgcttgcattagagtagtgtagcatgttactgcttttcgatatcctattctgatgcatagcctatccttgctactactgttgatacctttacctgcaatcctacatgcttagtataggatgctagatttccatcagtggccctacattcttgtccgtctgctgtgttatactatcgggccgtgatcacctgggcggtgatcacgggcatatacttatatactatatacatgacacatgtgatgactaaagtcgggtcggctcgtaggagtacccgcaagtggatctttgtggcggagcgacagggcaggttgagaccgcctacgtaagaggtgggcctggccc

SEQ ID NO: 8024 - DNA, 255 bp, Triticum aestivum
  Clone ID: LIB104-037-Q1-E1-G1
aagcacaatagttgtttcttacccgtctgcggtgccccctccacgtttactcctccggtcatattgtcgtagtgcttaggcgaagccctgtgcagatcacatcagcaacaccacgccgtcgtgctaacggaactcatcgactccttcgtacctctactggatcaagagttcaagggacgtcatcgagctgaacgtgtgcagaactcggaggtgccatacgttcggtacttgatcggttgattcgacaagacgttc

SEQ ID NO: 8025 - DNA, 418 bp, Triticum aestivum
  Clone ID: LIB104-037-Q1-E1-G2
gtcgatggggaaccctaggttgcgtcgtatgagtgcgggaggggagaagaggagcggggatggcgcaggcggtggaggagtggtaccggcagatgcccatcatcacgcgctcctacctcaccgccgccgtcctcaccaccgtcggctgcaccctcgagatcatctcgccctaccacctctacctcaaccccaagctggtggtgcagcactacgagatctggcgcctcgtcaccaacttcctctacttccgcaagatggatttggattttctgttccacatgttttttcttgcgcgctactgcaaacttctcgaggagaactcattcaggggaagaacggctgactttttctacatgctcttgtttggtgctactgtcctgactagcatcgttctgattggtgggacaataccttacat

SEQ ID NO: 8026 - DNA, 387 bp, Triticum aestivum
  Clone ID: LIB104-037-Q1-E1-H6
accccaaatcgagtcttatgatgatggactgtctatggatggatcatggataggtagatcttgatccgttcttttgcctaggtcagggtccactggaaagttgaaaagcgcttgaaagtttatgctgcctgttcaaatgatcttcttatttcaggggaaatgatctttacaacccactcaagcatccaggacgcagtccgcataataaagcagtttgatcgtgtatcgatcacgtagacggtcagcaccgcttttcattataatacagaaaaagtaagtagtaaattcagttattattatgctaatggacatagtaacaattttgtttctgacgtttttccaaccgtcttgacaacatctagcttcatgtttccagcttcagtcaaa

SEQ ID NO: 8027 - DNA, 433 bp, Triticum aestivum
  Clone ID: LIB104-037-Q1-E1-H7
gtcgatggggatcctgatagtgaatcttattataacgaaaagagatgcagctgcatatggttttcgttggttgcttcactcgagcataaacgggactcacctctaccacagataccttcacactatttgcgactaagagatgcaaatatacctgcttcctctatccaaaagtacctcgtgcatatactcagtctcccaagtgagtccgaggtggaaataaattgctgcgggcagccagtgaaccctacacaacctctgcgcaatttagtagagttgtggctgagggggcgatcagcacaggcaacaccggccattgtaggctcccccgcggaagagtttgtgatggtgctaaattatggacggccaaagcccatggaacctttgagtgcacagtaatgattcaacccatttccttttgaaaggtccggtcttt

SEQ ID NO: 8028 - DNA, 357 bp, Triticum aestivum
  unsure at all n locations
  Clone ID: LIB104-038-Q1-E1-A3
accgggctagaattcgcctatcgatcgcgggccgaagggtatccggattcgatccgaatcatcacacgtatccttggccggctgggggacaagactccatgtcttggcagtcgcagtagccaccgggacgctcggtgactgttccggccgtcatttccggcggcggtccgggaaacatcaacttgccgggtggcggccacttgcaccgggagcgcccgctaagctgagattattgtctccagctttgagggttcctagagctgcttcgcctgcagctgttgagaatgggagctctagcancagtaatacagtccctacaccaaaagttataatagatcaagactcagatccggatgc

SEQ ID NO: 8029 - DNA, 374 bp, Triticum aestivum
  Clone ID: LIB104-038-Q1-E1-A5
ttcgatccgaatcatcacacgcatcattggcaggctccatatccgcccaatatgtcttaacacgggcaagagctagccgagcgccctctgtgcacgctgacctcttcacagcttctaatcgaggcaccacgtcaaggagctgctgcaccaaattaaaataacttgtcggcttcgatccgcccaggcctaagcaatccatgacatatgtcatggcgagtccggacagtctattcagctcggcccactaggctaggcgatcgtccactgcaagtggacgccctggattggtaaactgcgaccagaagagtttctccacttcatgattgtccttatcttgaaagtacctggtcgcatcggcaacactagcctccaaa

SEQ ID NO: 8030 - DNA, 426 bp, Triticum aestivum
  Clone ID: LIB104-038-Q1-E1-A7
cattcgcgggccgacgggtcaatgcaagctacgaggagccaccttcaccccatcacttcaacaggcaagaagttgttgaagactcttcaggatcaacccagaatcattccatcaaacaactacaagagacgtagcaacacctaaggaaaactcagaagactgcacggggcacagggcacgactactgagtccgagaacccctagggtaggatgagtcgcgtaccccctatgcgcagatgagtctgtatgatggttcaaatagaatcgtgattgtgtgttgcttgtttttattgtttgtgtttttagataggccgcaacttttgccctatgcaacaagtacgcaactatatcaccttccttaccttgtttcttttgtttggccctttcggcacttgtttgtttgcacttgcactataaaaccccctt

SEQ ID NO: 8031 - DNA, 431 bp, Triticum aestivum
  unsure at all n locations
  Clone ID: LIB104-038-Q1-E1-A9
gggtcgacaggggcggatatgaaaaccatcgcactatgtaataagaaggaataataaaagtaacaaaattagataagtatctatctaaagtaagaatttttttctttcagaaagaagataagaacaagaggctcaccacggtggtgctggcgacgagatcgacgcgggcgatcgacggcggtgaagacggggacgggacatgacggaccgctaaacctagacaaatctcggggaaaatggagctcggaggtcgagtttcgagaggagaaggattaactaaggtggctcagacatttcatcgaacacctcatgttcatangaggtgagctagagcacccaaatgcncccccccctcgccggctagaaaaaaacagagcagctcggagagactgcggagcccgaggtgaaggtgctgaacctgaccatcctgt

SEQ ID NO: 8032 - DNA, 386 bp, Triticum aestivum
  unsure at all n locations
  Clone ID: LIB104-038-Q1-E1-B1
tcgcgaggccgaagattggatgcaccaacgccgcctcaccgtaatacctcatggagcgcgtgtggcgacacaaccagtacaagtggatggagacgcggggcgtggacgatgacgggcttgtgagctgcctccccaaggacatccggcgagatgtcaagcgccacctctgcctccgcctcgtccgccgcgtgccgctcttcgccaatatggacgatcgcctcctatacgccatctgcgatcggctcaagcccagcctctgcacggagtccacctacgtggtgcgggaaggggaccccgtcgacgagatgttcttcatcatcagaggccgcctcgagagctccaccatcgacgggggccgcgtanggttcttcaacaaggagctcctc

SEQ ID NO: 8033 - DNA, 392 bp, Triticum aestivum
  Clone ID: LIB104-038-Q1-E1-B12
tcgcgggtcgacggggctccgcacggtggaacagagagggagccagagaagggggggagaaggcacggggagagtgcgaggcctgggagggtgcgtggcatcgcggacggggtccagggcgacgagaggaagcaggaggtggccaggggaagcaggaggtggccgaggcctctcgggcgcgcgccacgcctcggtccttctggcgaggaggaagacgacagggggagtggagatgggctgggccgtgctgggccaggtaagtgggcgccaggtaacttccttctctctctctcttttatttcttttctatttctgttatttttttttgatttgatttaaaataccaaatcatttaataaaatcctggaaacaattatgggtgctttctgaat

SEQ ID NO: 8034 - DNA, 209 bp, Triticum aestivum
  Clone ID: LIB104-038-Q1-E1-B3
gcttgtacgtatgaaattgtaattcttgatgtgaatgatggcagagaggagaatgcaaatttggctctaatacgtcaaaaaaaaaaaaaaaaaaaaaaaaagcaaaaagaaaaacaaaaagaaaaaaaaaaaaagaaagctcaaaaggaaccacacataaaatacacaaacataaaacaaaataaatccatctagacagtcatcaaaaa

SEQ ID NO: 8035 - DNA, 442 bp, Triticum aestivum
  unsure at all n locations
  Clone ID: LIB104-038-Q1-E1-B5
cattcccgggccgacgggtactaaatgctaaatcattgttaattaaaattggctttgatataccttgggatccgggtggattcattacttgagcactatatgcctagcttaatggctttaaagaaagcgctgccagcgagacaacccggaacttttagagagtcatttatttctgttgagtgctttcatatagtttaaaaacaacaaaaataaagaggggaacccaaaactttttctaaaagaaaagtgaaagtgagagagacgagcattgtgaaagtgggggacgtccttgaactttgttcatgcccatgggaactttgtgaatcttaattacagaaacttttcaataaaaataattatccccttgtacaattccattgtattataaaaataatgtgccaaggtttgcctttaggatgtntacatttccttgatggtttgt

SEQ ID NO: 8036 - DNA, 407 bp, Triticum aestivum
  Clone ID: LIB104-038-Q1-E1-D4
ccttccccaaaaatgattcaatccttggaaaaaaaattcttccctccggatcggaggcaaaaggtaaacccaaaatttcccttagggtaccctatgaaaacgcatttttctaacttgggttcaagcttttcaggttgaggtttcttgacataagcatcgcatccccaaactttcagaaacgacagcttaggtttctttccaaactataattcatacggtgtcgtctcaacggatttcgacggagccctatttaaagtgaatgtggcagtctctaaagcataaccccaaaatgatagcagtacatctgtaagagacatcatagatcgcaccatatccaatacagtgcgattacgacgttcggacacaccatttcgctgaggtgttccaggcggcgtgagttgtgaaac

SEQ ID NO: 8037 - DNA, 444 bp, Triticum aestivum
  Clone ID: LIB104-038-Q1-E1-E3
taccgggcaagaattccggatcgacgggcttctttgagcaatttgacacaaagaaaaaatgtcacggagattgttgctcggacaacttctcgggcaaggaatgcaacgcaaagagccaaatcggtggggtgtttgacgctcttcgtgtcactgatgacctgttgatgaggagggcatattttaggaagcagcagcttgacaacaaaacaacatcacctaactctaactgaagaggacagccggtgtgatttgctcttacattgatatcgcatgcgtatgaataatggtccaatggaattgggagcggagtaagaagctcatgttgcctttatgcatgtaataatcatgcctgcctgcatggcccgctagctgttggtccaatgcctggctgcctgcctgaactggcgtcaatttccagtttgtttttgtaatatataataactc

SEQ ID NO: 8038 - DNA, 184 bp, Triticum aestivum
  Clone ID: LIB104-038-Q1-E1-E4
gaacgtcctaaaatgttggaaccggagtttggggaatatccactcaactggaagccggccccttaataccattgaatatccgggtttggccaatgcactttggtaatggcattgcccaactgaaaaggcattgcaatgatgtgatattatgatatgcttgaagcacgcctagtgactttgatgt

SEQ ID NO: 8039 - DNA, 389 bp, Triticum aestivum
  Clone ID: LIB104-038-Q1-E1-E6
tcgacggggccgtgaagggcaaggccggggagctgaaggcgtggctggaggtgctccgcgccggcacggacgggctggcgtgccagctggacgacttcctggacgacattgtggagggccgcaaggagctctccgacctctgcagccactgaccgtaccgatcgaccgtccgacccgatcgatgaaacgacgatggtggttcctgtcgcctgcttgcctggcggcaacgcgtggtggtggtgtacaagtaaagcaatgctgctccgacccataagtggcggcagtacgtagtcgtaggcgtcttttgcagtggcagtgccggtctgggatcggagagtggagtggagtggagtgtcgcagcgttttggtcaggtcatcatgttgttgct

SEQ ID NO: 8040 - DNA, 445 bp, Triticum aestivum
  unsure at all n locations
  Clone ID: LIB104-038-Q1-E1-G1
tcccgagtcgacggggagcacaagaatgactgctagcacaaggagggcatgatggagaagatcaaggacaagatcagcggcgacggccacggcgacggcaagaaggacggcgaccacaaggagaagaaggacaagaagaagaagaaggacaagaagcacggcgagggccacaaggacgacgacggccacggcagcagcagcagcgacagcgacagcgactgagccagctccggcccgcgctccggcagcgtgcagtgtangcgagatcgatgaataacacttgggagaagtgtgacagacatatatgttgcacggtttggagcgtgtggtagcatatgtatgtaatgcgtgacatgcctcatggatcttgtgatgtataataattagccggccgcactgcactgaacggtgcttgtaataataacgttaatcatgttggtattga

SEQ ID NO: 8041 - DNA, 391 bp, Triticum aestivum
  Clone ID: LIB104-038-Q1-E1-G2
gacgggtgaccgctacgatgaagacgacagaaatccaacggttacggcggcaaaaaaacaacacccccaaccaccctttctacagggttggaggcatcgacaaattcatcgccaaggcaaagaagatccccagcaagaacgcttgatgacgaggtgtggccaccgccctgtacaagttaatttttttgggatttcagctgtccgcccgaaacttgctcacaagcaggagtgtgccagctcctgctgagggatccttgtttttgttcgtttttactccaatttacccgtaataagcaactgcagtgacattggtttagtctgcacaacagcaacactactcttggcttggaaaacacttgtgccctttgtaatgaaaaaccggacgcactgc

SEQ ID NO: 8042 - DNA, 177 bp, Triticum aestivum
  Clone ID: LIB104-038-Q1-E1-G4
ggccaagggccggcgccaaccgggcccggccaatttccggcaaaaccttaaaaaaaaatgccgcaaataaaaatccaaaaaaaaaaatataaaaaaaacaaaaaaaaaccggcggcccaaaagatcaaactaacttcccttaagcaattaaacctcaaatgtacaaaatcaataacg

SEQ ID NO: 8043 - DNA, 421 bp, Triticum aestivum
  Clone ID: LIB104-038-Q1-E1-G8
attcccgggccgacggtcacgtcgacggggaggagggccgtctcctcgacgaaccggagggtcatgtcccctgagagcttccttgcaaggtagaggaaaggcttctcgaagttgtagttgctcttggcagagatctcgtagtactggaggttcttcttcctgtggaaggtcaccatcttggctttcacctgccggttcttcacgtccaccttgttgccgcacaggacgatcgggatgttctcgcacaccctgcagatgtctctgtgccaggtggggacgttcttgtaagtgagtcgggaggtgacatcgaacatgatgattgcacactggccatggatgtagtatccgtcacggaggccaccgaacttctcctgtccggccgtgtcccagcagtagaacctgatcttgccgtggctcgtct

SEQ ID NO: 8044 - DNA, 341 bp, Triticum aestivum
  Clone ID: LIB104-038-Q1-E1-H5
atcccaagagtgagtcgtattatatcggaatcatacaagcatacaataagcaatcaggcagaatcacgagtgaaactcaaataagagatctaaccagaaagttcagcttaagaactctggttcgcaaaatgaatcaaatcaaacgaagcatgaatactcaagcggtgagagaagcaagcttcgtttattaatctggactaaggtcaaattttacagtagcaaaaacgtggttaagttggataaacggaaagagggtttcgagacgaagctctaggcgcttgaatcgcctgattccgataaatgagcgaaaagttatactagaacgaagatcggatcagaaa

SEQ ID NO: 8045 - DNA, 409 bp, Triticum aestivum
  Clone ID: LIB104-038-Q1-E1-H6
ggccgacgggtatgtgtatttatcttttaattagtgtttgtgcaaagtagaacctataggataacctacgatgatagttgatttgattctgctgaaaaacagaaactttgcacgcacgaatataattttgttaaatcacaggaatgtgcttttgcgatgattctttttgatgctgttccataaaaaaattgtcccggacttcctattttggtaggatgtttagagttccagaagtttgcgttagttacagattgctacagactgttctgtttttgacagattctgtttttcgtgtgttgtttgcttatttcaatgcatctatggctagtaaattagtttataaaccataaataagttggaatacagtaggtttaacaccaatataaataaagaatgagttcattgcagt

SEQ ID NO: 8046 - DNA, 70 bp, Triticum aestivum
  Clone ID: LIB104-039-Q1-E1-A10
accgggcgtatattccggatcacggggtatgactaatactatcgatataggttattctacatgattactc

SEQ ID NO: 8047 - DNA, 423 bp, Triticum aestivum
  Clone ID: LIB104-039-Q1-E1-A11
cgcgggtcgaaagaggcggataactgcggcatctgcagagttggaggcaaggacaacttctttcactgccgcaagtgcggatcgtgctactcggtgaccctccgggataagcatgtctgcatcgaggactcgatgaagaacaactgcccgatctgctacgagtacctgttcgactccctgagggaggcgtcggtgctgcgatgcggccacaccatgcacttgcagtgcttccacgagatgctcaagcacgacaagttcacttgccccatgtgctccgtgtccatctttgacatggagaaattcctgagggccttagatgccgagattgaggcgaagttcttacacatgggaaagggatggatcgtgtgcaaccactgctgggacacgacccgggtgtatccgggcatgacgggacagagaaag

SEQ ID NO: 8048 - DNA, 114 bp, Triticum aestivum
  Clone ID: LIB104-039-Q1-E1-A12
cgggggcacgtgaatcgtcgagcgagaacatggatcggctggtcgagttcttgcgtgccgggtgttatggtgctacctgaatgagttataccggtgttgtttggtaccatgcat

SEQ ID NO: 8049 - DNA, 396 bp, Triticum aestivum
  unsure at all n locations
  Clone ID: LIB104-039-Q1-E1-A4
cggggacatgagacaacataaagtgagacgccagaagaggcgcaggcggaggaggattcggggggtttcagcttgttctgaaactgcaaccttggttatcagccgacttacaccgggatggtagcaggccagcaagcagcacttgtactgaacttgtttttgcatgtctagatggggaagtgattcttctctgtgattcttgtatggccattgtgtataatagaaacgtttgcatgcaaccacggctctggctgcatggtctaaagagctaaacatgaacagagaacacatctggagtatcctgtancatacttggggaacacacgtctctacagtgaatttgctgtatacgtgtctgtcagttcgtntataatttaatttaacatacttgggcag

SEQ ID NO: 8050 - DNA, 417 bp, Triticum aestivum
  Clone ID: LIB104-039-Q1-E1-A5
tggccctaaaccccatcattgacggatttcacctcactcgagtccttatgaacggcggcagcagcctgaacctgctctatcaggatacagtgcgaaaaatgggtatcgatccctcgaggatcaaacccagcaaaaccacctttaaaggcgtcatcccaggtgtagaggcccattgcacaggctcaatcacactggaagtggtctttgtatcaccggataacttccgaagcgaagagttaatcttcgacatcgtcccatttcgaagtggttatcatgcactgctcggacggacaacatttgcaaaattcaatgcagtgccgcattacgcgtacctcaagctcaagatgccaggacctcgcggggtcataacagtaaatggaaacatagaatgctcgctctgtacagaagagcacactg

SEQ ID NO: 8051 - DNA, 451 bp, Triticum aestivum
  Clone ID: LIB104-039-Q1-E1-A7
gggtcgacgggaacttcctacattcatggaagggtgcatgaactctcccaaaagacaactccttttgtttcggcgccggtcttgggatattgccatatttcctttcaactttcgcaaatcaacttgtcctcatctttggtgtatgatcccgtctgaatgctttcctcctcttttgtgcattggcctttaaggtgaggtcatcaatgaacaacggctcctccttaatgtctacgccatcttcttcatcttcacaataaatgtcttcatgccatggctcgccttggccgtcagtcgcttcttgattgttgtggctgccaatgtgctcgacaccatgatcttggctgtgaccgtcttgactttgggtctcgtcgcgatcgaaggcttggccatggccctcggggtggaaggctttggcactaccctcatagatgatgttctccatgaaatcgtt

SEQ ID NO: 8052 - DNA, 436 bp, Triticum aestivum
  Clone ID: LIB104-039-Q1-E1-A9
gggtccacgggattactgtagagcaattgatagaaaagcgaataattatgagaatatctaggcatgttcatgtatataggtatcacgtgttttacagttggacaaactcaaggccggcatccaacaactattaagtccaacacaattcgacggctatccagcatgcatctagagtattaagttcataagaacagagtaacacattaggtaagatgacatgatgtagagggataaactcaagcaatatgatataaaccccatctttttatcctcaatggcaacaatacaatacgtgtcgtttccctttctgtcactgggatcaagcaccgcaagattgaacccaaagctaagctcttctcctattgcaagaaagatcaatctagtaggccaaaccagactaataattcgaagagacttgcaaagataaccaatcatg

SEQ ID NO: 8053 - DNA, 262 bp, Triticum aestivum
  Clone ID: LIB104-039-Q1-E1-B1
taattccaagcctggtggaacagaaaaaaggccaaccttagcccaaattggaaaggccccttaacaaccaacaaattcctaacgggaattgaaacggcaagccatgcaaccgaacaacgaaccaagccaaaaccaagggacaaaagccgtctttgaagaatttaagcctaaccccgggaccaagggtcctccccttcctccgttcaactttcaaaattccttccccaaccttggtttccctcctttttccccaacttttttc

SEQ ID NO: 8054 - DNA, 337 bp, Triticum aestivum
  Clone ID: LIB104-039-Q1-E1-B10
gggtgattcccaaagcatgtacatatggtgaaccattatgtgacgaagtcagagcatgatttatttattgattgtcttccttatgagtggcggtcggggacgagcgatggtattttgctacaaatctacccccctaggagcatgcgtgtagtactttgtttcgataactaatatatttttgtaataagtatgtgagttctttatgaataatgttgagtccatggattatacgcactctcacccttccaccattgcaagcctctctagtaccacacaactttcgtcggtaccataaacccaccatttgccttcctcaaaacagccaccatacctacct

SEQ ID NO: 8055 - DNA, 430 bp, Triticum aestivum
  Clone ID: LIB104-039-Q1-E1-B11
cgggatgacgttacgagattctcaggaaatgaactacgatagcaagctccaaaacatgagctggttctgctacaaacatgtgaaacacgttgtcccagacaagcatggccatgtagtagtcatataattaaacactaccgagttcaggtggggaaccatcatcgaggatatcgaagtctttacgcaagtccatggattagatcccaagcatagacttcttttccttgaacaagtcaatcagtggcttagtgtgctagggacacatatagaatgaaggttgcaagtctccagactacagaatacttcgcacgtgcgcatgactgatttgggatgattccaaaggaaacaaaacaatctttctcaaattcacggcggcaactttcaccaaatgcacgtgtataagaggaagtcactcctttcatcaaacaaa

SEQ ID NO: 8056 - DNA, 226 bp, Triticum aestivum
  unsure at all n locations
  Clone ID: LIB104-039-Q1-E1-B12
ttcccgggatcgcacgggcggcggtgacgtnggcggcgacgggagtggctgnaggctgcgggggttggcgacgtggcggggcgctgattgggtcgggagtgaggtgganggcggcggccggacatgttcaagcgggggaaaggatgaaacgtcccggcgatgcgganggggaatttgatctannggttttgccccgaaaactccggnggaaggggaactaatatat

SEQ ID NO: 8057 - DNA, 329 bp, Triticum aestivum
  unsure at all n locations
  Clone ID: LIB104-039-Q1-E1-B2
cggggccaaaggaaaatagaagcanacgttggtaccggtaggtccggatgcgcaatcaacggcgggatttgtgttgcgtacctcacacctcatagtcctggttgttgcttggatgtggatgttttgtgggatgtgtgacccctgaccgctgatcgccgctgctctgcttgctaacgacaagttcatgtagctgacctgtccaacatcactgttggccggcgtacaaaatccttgcgtctgtgtggtgcccctgggactgacctgcatcagttaactagtgtacatttgcagaatctctctgttttcttgcagaaaaaaaataannngnt

SEQ ID NO: 8058 - DNA, 289 bp, Triticum aestivum
  Clone ID: LIB104-039-Q1-E1-B3
gatgtagaccaatccgatacaaaactcctaaattaataaaagaaacccgatttcaacaaacgaacaaaaaatcccaattgagaataaggtgaattccataaacccaagattacaaaaaggtccaaggtgcaaagataaaaaacttaaggttgaaggaataaaaaatcctcctgggttcgaataacagggaaattcattaaccacaaaaaccatcaaaactataatctgaaacattatcctaaataaacaattttctgaataatgaataaattctaaaccatggggctat

SEQ ID NO: 8059 - DNA, 369 bp, Triticum aestivum
  Clone ID: LIB104-039-Q1-E1-B4
caacaacgggaaccctttccaaaaattttcctaaaaaggcctgaatgtctccctctcaactgacaaccctcggcaaattcacctaacaaaagaacctcgggttgaaaaatacattgttgctgcttcgctgtggaaccttagttcatgtgacctgtgtgaaatacccaggaattctgtgtaccattccggtttctctcaaaggctgaattcacactggattggtagaaactactataaaagaggtcccgacggcaatgacatcaccagacaaatgttcctcacgtcaggattgaattccgacacaacatttggaaagacgagatggagctgatacatttcggaaatgttaagcctacagaagaaaacgac

SEQ ID NO: 8060 - DNA, 455 bp, Triticum aestivum
  Clone ID: LIB104-039-Q1-E1-B7
cggtcctaggaatcccgggtcgacgggataggagaatgccacagaagtgtggtatcatttaacatagtctggaggggttgaatagactaccattaacaaaggggactgcttgtcaacttttagtttccttgcaattttaagcttttctacagtagtatgttgcctcccaaaggagttattgggtttcccccaaagaggaaggatgatgtagaacaacaacaaagtatttccttcggttagagaacaaaggttatcaatcctgtagaaagcttccatgctaacaatataaacacacctacacacaaacaagatacaaacttgcacccaacatggcaagagggttgtcaagccccttgccttgctaattacaagattaaaagaaaattatagagataaatagtggtaaaatagcacgggaaataaaaagagtaaattgtgtacaagaatttattaat

SEQ ID NO: 8061 - DNA, 396 bp, Triticum aestivum
  Clone ID: LIB104-039-Q1-E1-B9
agctttgggccaccggctggctgcatgaccgcatacgtgtcgtcgtctcaagcttcttcgtcaaggttctccagctgccatggcgctgggggatgaagtacttctgggacaccttgctggacgccgaccttgagagcgacgcgttgggctggcagtacatctccgggtctctgcctgatggccgtgagctcgaccgcattgacaacccgcagtttgaaggctacaagttcgacccatacggggagtacgtccggcgatggctgccggagctggcgaggctaccaacggaatggatacaccacccctgggatgcacccgagtctgtgctgcaggctgcaggaattgagctaggttccaattaccctctccccattgttgagctagatgaagccaaat

SEQ ID NO: 8062 - DNA, 312 bp, Triticum aestivum
  unsure at all n locations
  Clone ID: LIB104-039-Q1-E1-C1
taccggccctacattcncgtagtcacggggagcgaccatgacgagctgtagatggttttaagggaaccaatttttgtaatggggttagtagggtgagagaggagacatggataattggtaccgctgctgcttactttgggtctgcggttgttggaggtggttgagactgctgttattagtctgttgtccgagctgtagagaactctttgctgctgctgttacttccttctgatgttttttcgttttgttattatatagccggatggattcgcatcggaatttaacgcgaagaaaagatatgcagttttatct

SEQ ID NO: 8063 - DNA, 409 bp, Triticum aestivum
  unsure at all n locations
  Clone ID: LIB104-039-Q1-E1-C10
ttccgggtccacggggatgccgaatttgtgtgtcgtggctgggcatacggtgaatggagtggccgagttgcacagcaacatcttganacacgagctgtttgcagattatgtctctatttggcctaacanattccagaacanaactaatggaattacaccccgcagatggctccgtttttgcaaccctgagctgagtgaaatagtcacaaaatggctaaaaacagatcagtggacaagcaaccttgatcttctcaacggtcttcggaaattcgcagatgatgaaaaactacatgctgagtgggcagcagccaagctggccagcanaaagcgcttagccaaacatgtgttggatgtgactggtgttacaattgattcanatagccttttcgatatacaaattaaacgcaat

SEQ ID NO: 8064 - DNA, 424 bp, Triticum aestivum
  Clone ID: LIB104-039-Q1-E1-C11
ttccggatccacggggctgcgatagtgaggagggcgctgtgctacccactcaaattggtcgccaaaaatgctggtgtcaatggcagtgttgttaccgagaacgttctttctaacgacaacttcaagttcggctacaacgccgccactgggcagtacgaggacttgatggctgctggtatcatcgaccccactaaggtggtgagatgttgcctggagcacgccgcgtcagtggccaagaccttcctgacgtcggacgtggtggtggtcgagatcaaggagcccgaggccgcgcgcctcgccaaccccatggacaactccggcttcggatactgatgagcgacacggccgagtttctctggatgacgtggtttaacttttggtaccatggaccaagttttgagagattgattgatgatgatgatgt

SEQ ID NO: 8065 - DNA, 70 bp, Triticum aestivum
  unsure at all n locations
  Clone ID: LIB104-039-Q1-E1-C12
gaaaaagaaacngtgcnaanagaacaaaattggacaacaaaaaaaacaaaaaacgggcgccccaaaagga

SEQ ID NO: 8066 - DNA, 425 bp, Triticum aestivum
  unsure at all n locations
  Clone ID: LIB104-039-Q1-E1-C2
cgggtctagccaagttttttaggttttgggaaccttctnaaaggttcctggaaaccggtttttttattatttttattattttcgttttattttctatttttctctttcttttttctgccttttttctttcttcttgcgctttttctttttgattttttttgtgttttcagctaatgtgttcagaatttttcataaaaactgagattttcagatttttcttcagaaatttcatagaattttagaatttcacaaattgttcgcttatttaaaaaaagtgttcatcttttcaaattttgttcacaaactaaaaaatgttcggtttaagaaatatgttcccgctttcataatttgttcacaaattgctcaggaatttcataaaatattcccacttttgaaagttgttcaaaacaaaattctgaaaaatg

SEQ ID NO: 8067 - DNA, 369 bp, Triticum aestivum
  Clone ID: LIB104-039-Q1-E1-C3
ggtccaacccgaagccccggggcaaaacaaccggaataacccccaaaaggtcaaacaacacggggaatcctgggaaataaccggacccagaacgaacacaagccggcaaatccaattttcaacaaaccaatttaaaacttgcaaattttaacaagccggttaaacttgatttgggccccttggaaaaatttggtacccccggaaccggcaatttgaattaacttacaaggtagggccggccggccggtggtgtcattcaaaaccggctttccgcttgttgcaccaaattcttgcagggaaagtgtaggtccaaaattttgcaaaggaattggtgaactgggttcttttattagaaaccacacttcagcg

SEQ ID NO: 8068 - DNA, 413 bp, Triticum aestivum
  Clone ID: LIB104-039-Q1-E1-C4
actacgaaaagatgccgggcgtgaaagcggtggacatggtcgacgccgacgcgctggcgcacatcagcgggatgagctcctacatgtacaaccacacggtggagtcgtggatataatctgactcacgacgaacacgagcccgctaattccatttttcaccaacctattttacacgtgcagatttttaacagcctgtttaacttgattttggtcccgtggaataattttgtagctcctgaagcggcgagttgaatttacttaccatgtagggtcggccggtctgttgtgtcagtcgacatctgcttttcgcttgttgcagctaattcttgcacgtgaatgtgaagttctacagtttgcagaggagttgtgtacttggattcttttaattgaaaagcacagcttcagcgaataca

SEQ ID NO: 8069 - DNA, 352 bp, Triticum aestivum
  Clone ID: LIB104-039-Q1-E1-C5
cccgggtccacggggagttcagaggcgtcgccatggacatccaggaggagtgcccgcccgacgaccccctgctccggccgtggcagatcccgtaccctgccaccgccatgcccatcgccgccaccgccacgcacatgctccagtactgatcgatccggtgatgattgggtcaataattgaggatcccctgtaggagcggagctgagctgtggctggcaagaggaagaagatctaccctacttggctgctgccttgaggattattaccaaggcgtagtttgctgctatatgttgtgtttattattatgtttcagtaagtgtccgccgtcgtcgtcctcgtcctccatgtccta

SEQ ID NO: 8070 - DNA, 220 bp, Triticum aestivum
  Clone ID: LIB104-039-Q1-E1-C9
cgggagatccacactgccgtatgcctcgtcctcgccagcgaggtcacgattccgcagtctccgagggcaccactcggtgtcgacaagttcacctcctcttaggctgttcgtcggccgtttctcggatctagccgtacgggtgcgtttatggccgtgtaaacctcgtcgaatcgtacccgatgtcactgtaccgcccgacatgttacaggtgcctgcctca

SEQ ID NO: 8071 - DNA, 381 bp, Triticum aestivum
  Clone ID: LIB104-039-Q1-E1-D1
ccacgggacacctaccaccccagctccagtgcctacaaggtcatcatcgactttggcctccaaaaattcttcaaattaaattaactaacaacctaacaataattgtaaaaggacaaaggggaaaaggaggaaaattaaaaggaaaaaccaaggattttgacaaacattcattaaggggttaacacgtttcccaaaaataaaaggaggaaaaatcctggactgaccaacatcagtccaaaaattttgtttcagtttaggtccaaattttttgccaattaagggtttacacttttccctaaaaaaaaaaaaaaaaaaaaggaaaaaaaaaaaaaaccaaaaaaaaaaaaaaaaaaaaaaaaaaaaaaaaccggccccccaaaa

SEQ ID NO: 8072 - DNA, 68 bp, Triticum aestivum
  Clone ID: LIB104-039-Q1-E1-D10
ttcccgggaccacgggaatgcgacatgatggaccgatatccctagacacatctcgaggaaaatggagc

SEQ ID NO: 8073 - DNA, 412 bp, Triticum aestivum
  unsure at all n locations
  Clone ID: LIB104-039-Q1-E1-D11
gaatggaccatctgatgaagcttctcatggcaatcaaactttacattgcatantgccactgggcgctgccaagcaagaggagctgtctgctaggacccccttggttcttcaaccaatgcattaacggataacctaaagaagaattcaattatgagaatactgccccgctttttcccactgttgattgatctgaatcgctgcgaacatagctctggagatgttcaacacgcgctgtacaaaatcttcaaatcatcaataggccctatgatagaagtataatggcacattcccgtcctgctaggcgcacaattttgtgacaacattctgacatcctgaatgagcccttccttcaggatcctggagttcaagtgcatattactagtccagatatcatgtataaagaggaaaatac

SEQ ID NO: 8074 - DNA, 446 bp, Triticum aestivum
  Clone ID: LIB104-039-Q1-E1-D2
tccacggggacgaaggcacaactcatcctaaaggtccttcaaggcccgtaatagagttgccagatattcgaggtgacacagattgttttgctggatctgctggagttggcatgcctcataaactcaaacaagtacaaggcgatgattcatggatgtttgaggaaatttctgtatcacctagatcattatgtttgaatgaggaaggtgaaagtgtcgtctttgagcatagggaatctggatcttgtgttgagcacagggaatctggatctcctgttgatgattacttaccccatgcaattggttcgtgcgaagagagtaaaatttctccatatttccttgatcttgatccaagaacttcagggaagaaatgtcaagaagtagaccattggaatcataaacgacatcatgactgtcctgccggagactgtaatgaccagaatgaattt

SEQ ID NO: 8075 - DNA, 437 bp, Triticum aestivum
  unsure at all n locations
  Clone ID: LIB104-039-Q1-E1-D3
tccacggggacggttaaggtanggtttcgtccacaaattcaaggaaaggagcacatattaaaaggtaaaggaacctaggaaagtcaaaataaggtgcggtttttggccacccaatcgtgatcaaatgatcaaaatgataaaggaggtttaggtgggtttttgggcaactttggaagggtgttgggctgcaacactaacgaagccttttcggtcccctcggtaaacctttgagtatcaaacgaagtcaaaatggcacgaaacttgacaggcggtctaccggtagtgaaccaaggccgcatggcaagtctcggtcaaatccgaaaatgtttaacacccgcacacgaaaaangaggtagaaagggacaccgggtgacatangaacgccggattgcaaaacggacaacagggaaaatgcttggatgcatgaaacgaacatg

SEQ ID NO: 8076 - DNA, 166 bp, Triticum aestivum
  unsure at all n locations
  Clone ID: LIB104-039-Q1-E1-D9
accgggcctaaattcncggatcgacgggggtgtgggtgagtagagggatgtcctggccaacggtgggaataataagaagccgtgaagcctccgccggaacaaaaccgggcacgggaagcaagaacatgcgacacgaccggcgctgccttgggccgctggagcaaga

SEQ ID NO: 8077 - DNA, 242 bp, Triticum aestivum
  Clone ID: LIB104-039-Q1-E1-E11
tagcttcagactcgatccagagatacctaggttggctatcgctatgtagagtggttacatgctgagagtggacattatgtgtcagtctctcgtgatgttctggaatgacacttctgtcgtgtcacagagttctgcgtcttatatatcctccaagtgagcctttagctgatcatagttcaggtgatgttgatcttgaacgagctagagacactggaaggtcgccaagagtaagaagggataga

SEQ ID NO: 8078 - DNA, 451 bp, Triticum aestivum
  unsure at all n locations
  Clone ID: LIB104-039-Q1-E1-E4
attccgaggtcgacgggccccaagtaaatattcaaggagactcaaacgtctaagcttggggatgccccggaaggcatcccctctttcttcaacaaatatcggtatgtttttggattcgttttgttcatgcgatatgtgcaaatcttggagcgtcttttgcatttagttttcatttttcttttatgcaccatgctggtatgagatagtccttggttgatttatagaattctctatgcacttcacttatatcttttgagtatggctttatagaatgcttcatgtgcttcacttatatcatttgaagtttggattgcctgtttctcttcacatagaaaaccgccatttgtagaatgctcttttgcttcacttatatttattagagcatgggcatatcttttgtagaaagaattaaactctcttgcttcacntatatccatttagagagatgaca

SEQ ID NO: 8079 - DNA, 405 bp, Triticum aestivum
  unsure at all n locations
  Clone ID: LIB104-039-Q1-E1-E9
cgggatattgcctctgggctaaaaactctgacgatggggtcaaaagtaactctctcgcggcctgggaaattgtctgccgcccaaaatgctgcggaggccttggtgttattgatattaaaacacagaatgcagccctcctcctaaaacatctattcaaattctataatcatgaagatgttccttgggtggagcttgtttgggatgcctactacagggacaagataccgcatgcatctgaggcggtgggctctttctggtggaaagatgtgatgcaactcagtgggatcttccgagggatcactaaagtcacccccggggatggctctagtgctctgtctggaaggatgtttggtttgataatactcaggattccncaataatggatatatacccacgagccttttc

SEQ ID NO: 8080 - DNA, 353 bp, Triticum aestivum
  unsure at all n locations
  Clone ID: LIB104-039-Q1-E1-F1
cgcctgccggtaccgccccgaaattcncgagtccacggggggcgggcaacagctgctgctgctgcagcagcagcagacccggaacaacaccgcaaaataaaaaataaagcaaaaataangagcaaaccaaaggaaacaacaaaaccaaatattatatataaaaaaaggctccgcaatttacagatagtaatttgcaatacttccttccctgcttccatttttgtatggcctctcaaagcttgcttttgttcaagctggaattgtatcatttctcgaaaacttgtcaccttgaacatgaaactattggtttgcacagaaaaaaaaaaaaaaaaaaaaaaaaaaaaaagcggccg

SEQ ID NO: 8081 - DNA, 348 bp, Triticum aestivum
  unsure at all n locations
  Clone ID: LIB104-039-Q1-E1-F10
attcncgggacgacgggggttacatcactccctactttattaccaaccaaaagacccagaaatgtgaattggaagaacccttgatcttgattcatgacaagaaagtttcgaacatgcatgcagtagttaaagtgttagagatggctctgaagaagcaaaagcctctactgattgttgctgaagatctagaaagtgaggcattgggcactctgattatcaacaagctccgtgcaggcattaaggtctgtgctgttaaagctcctggttttggggaaaacaagaaagcaaatttacaggaccttgctaaccttactggcggagaagtcataactgaagagcttgggatga

SEQ ID NO: 8082 - DNA, 284 bp, Triticum aestivum
  Clone ID: LIB104-039-Q1-E1-F12
cgggacagcgctagaatacctgcagcacgagaatttcatggaatgagcagtcagttagtcaaggcaatgccgagtcctaattttacaaaagtccaagaagacaattgtacttcgtcaacatgtgccatttgcctggaagactacagtgttggtgaaaagataagggtgctgccttgtcgtcacaagttccatgctgcttgcgtggacctgtggctcacatcatggaggacattctgccctgtatacaagcgagatgcaaatgctggaatgtcaaatttccctcc

SEQ ID NO: 8083 - DNA, 374 bp, Triticum aestivum
  Clone ID: LIB104-039-Q1-E1-F3
catcattgggtaataataatgaaccaaacggaacaaggtcaagttaaatggaacaaagggttccaaaaaattggaccgctgtagatagagggggaaggtgatggaaatgttggtgaagatggcggaggtgttggtgaagatcgtggtgatgatgatggcccccggtggcactccggcgccaccggaagctagggggagagagccccccttcttcttcttcttcttcttcttccttgaccttctccctagatgggagaagggtttcccgtccgggtccatggtctccacggccgtgggaggggcgagaacccctcctgagattggatctgtcactctgtctctctctgtttctgcgttctctctattctgccctt

SEQ ID NO: 8084 - DNA, 383 bp, Triticum aestivum
  Clone ID: LIB104-039-Q1-E1-F9
acgggcgtaccatagtgtcggggagccggcgcaacaagcgcaagcgctgccaatagtgccgggagcaacggacttcggcgcaatgccgcaatgtggaaagaccggtgtggagcacgctctcttgggctgcgccaacgtctacgacaactgactcctctaagccgtggcttatggggtgtgtgttgttataagccacagcgtgtgtggtcaggctcgtcacgcgcgacggattcacgcgggacgtacgggacgcactgatgcattcggactcgtcggacacgactgatgcgcgcaggacatgcggggtgcaacggaaacgtggcgtgtgtgcatgtgtggtgtgcgtgtgtgcgcatgtatgtgtgtagcgtagtggccacgct

SEQ ID NO: 8085 - DNA, 53 bp, Triticum aestivum
  unsure at all n locations
  Clone ID: LIB104-039-Q1-E1-G1
attcncgagtcgacgggacacggctcgaatacctgcagcacgagaaattcatg

SEQ ID NO: 8086 - DNA, 406 bp, Triticum aestivum
  Clone ID: LIB104-039-Q1-E1-G11
ttccgggatcacgggctgcggagagctcggcgccgccggcgctctgccacagttcgtgaacccagtcgcccgccggaacaatccgtgttcttggccccatttaatttcaaaaataaaaattagtaccagcagtgatctgtattaggttgtagtagcactagtaatagaagtagtagtagcgtcagttttagcaggtgtgtattttggattggtgacacattggttttggggtgccggcgataagcggtggagatggatgaacaagcaagagatccatgtctagtagtagtagttggtttgttagaagcaataagtgggtctctttcggaggcgagagagatgttttagctgtttgtagcaagcgctagagatgataatgttggagtgaaatgaggctaatctcaaa

SEQ ID NO: 8087 - DNA, 441 bp, Triticum aestivum
  unsure at all n locations
  Clone ID: LIB104-039-Q1-E1-G2
attcncgagtcgacgccaagaaaggcttctatcaatgtatcatcagtatcaatcactacatgacaccacacaacagatatgctgctgtcagcagtcctctctaaatagacactgcaattatcgtataagtacatcattgctgctgtcagcagtgctctctaaatagacactgcaattatcatgtacatcattgctgctgcaatgaaccattaagaattatttaaaatctagcctaccatctgcgttgtcgtcaacagagggttgaggcggagttacaaaatctgtatgagaaaccgagggattgtccgagtcagcgacatctttgttatcttcagagctgtcagaagcagctgagatgacgtcacctgattctgaatgtgttctgtcnacatatgcttcaagtaaggagctctcggccacgtcagcatcgccgttatgccg

SEQ ID NO: 8088 - DNA, 429 bp, Triticum aestivum
  Clone ID: LIB104-039-Q1-E1-G4
acggggccaccacgggtccatgagggtttacgatggaagctcaccatattcgactccgaagcaaacaaggcctaggaaatcaagccactctggggagcagcgacaacctttcagtggcaatgggttttgacattgcctttcacgatcatcccccggattagtagtgattgagccagcggatgtgctggtagcaacacatcattctgcctttgggtttgtcagttcggtacccattatatatatgtttttttctctagccattgctattctttttagtgttgcgcccaacgaaagcattggagtggtgccaaatttttgccatgtgccctcttgtacagtatatcactgctcaatcatttcgacttaaaatgaaagcggtgatgggtatagatttgtgttctagacccatggaagatgctatgggaacct

SEQ ID NO: 8089 - DNA, 175 bp, Triticum aestivum
  Clone ID: LIB104-039-Q1-E1-H1
aaaatgcctattcaagtatccttttaagctattcaaaaattcagtaaaaatttcgattaaaaatatgtcatcgatatataatatcaaaaacgctacagagctcccactcactttcttgtaaatacaggcttctccaaaagtccgtataaaaccaaaaggctttgattacactatc

SEQ ID NO: 8090 - DNA, 355 bp, Triticum aestivum
  Clone ID: LIB104-039-Q1-E1-H12
tccgggacaagcgtgagacgcaacgagatacaagactcctttgggttgaggatcgatactatgtctacgtaccatgctactcagagcttccagcccaagaaacttcagttcagtgaatgccaacttctgttcaatgtgcatctgtggttgttctgctgcgatatgctgaaccaccttgtatatcacgctagccggagtcatccgtgtgaccagtccaggaaccctgccatttttactttgtcgatgcagagttacgttcctgtactaacctaaaactcttcaccatgttcctagttaaataccttgtttaagtttgctatatatcctttatgtaagatttgatgagctaaaacaa

SEQ ID NO: 8091 - DNA, 440 bp, Triticum aestivum
  Clone ID: LIB104-039-Q1-E1-H2
acggggacgtggtgaggctcaaactgcaaggagcatgcggggtgtgcccgagctcggtgatgaccatgaggatgggcattcagcggcgtttgatggatgaaataccagagattgctgcagttgaagctatcacggacaaggacgctgggcttaagctgaacgaagagaatgttgagaaggtactcgatgagatcaggccatacctcaccggtgcaggaggcggtaatctcaggtttgtcgcgatcaacaaattcttcgtgaaagtccaactcaagggccctgcagcaggtgtggcggccgtccgagttgctatagcacagaagctcaaagagaagatcccatccatcgcagctgtccggctactgccgtaaacttcaactgcaaaacattgctgtgaatatctggttatccaggagaatgctatgaatgcgctaactgat

SEQ ID NO: 8092 - DNA, 379 bp, Triticum aestivum
  Clone ID: LIB104-039-Q1-E1-H3
gaagcgtgaactgggcaatccaattccaattccgaaagcctccccaaaacaatggccccttcggggccggaaacaaaacccaaccggcccttccaacttcaacaacggccggcaatcacaatgggtttttggaattggttgccgggcaagaaggccaaccaggaccatgaggcaggctcgtcatcaacctcaccagaaaccgcggccacctactcaacctcactgatggcattctcaatctcccacctgcagctcggccccgcttccggtcgtacgttaaggtggaggtatgccgatggtactggcagacctgcaccccgttgtcgtggtctgttgccaagcccgccccgcgagccgcgtgtgcgtgtgccgagcccac

SEQ ID NO: 8093 - DNA, 395 bp, Triticum aestivum
  unsure at all n locations
  Clone ID: LIB104-039-Q1-E1-H8
cgggcacgcttcacactccgggtactctatcgcaatcatacaagcatacaataagcaatcaagcaaaatcacgagtaaaactcaaataagagatctaaccagaaagttcaacttaagaactctggttcgcaaaaagaatcaaatcaaacgaagcaagaatactcaagcggtgagagaaacaagcttcgtttattaatctggactaaggtcaaattttacagtagcaaaaacttgtttaagttggataaacggaaagagggtttcgagacgaaactctaggcgcttgaatcgcctgattccgataaatgagcgaaaagttatactagaacgaaaatcggatcagaaatcacgaanaaaaaagcnaaaccagaaaaaaaaaaaaaaagcggccgctc

SEQ ID NO: 8094 - DNA, 449 bp, Triticum aestivum
  unsure at all n locations
  Clone ID: LIB104-039-Q1-E1-H9
attcncggatcgacggggttcgtgaacacggcggggccggacgggcaccaagcggtggcgctgcacgtgcanggggacatgtcggtgttcttcaactgcaggttcgangggtaccaggacacgccgtacgtgcacgccaaccggcagttcttccgcaactgcgaggtgctgggcaccatcgacttcatcttcggcaactcggcggcggtgttccagaactgcctcatgacggtgcggaagcccatggacaaccagggcaacatggtgaccgcgcacgggcgcacggaccccaacatgcccaccggcatcgtgctccaggggtgcaagatcgtgccggaggacgcgctgttccccgtcaggcatacggtgcctagctacctcggacggccgtggaaggaatactccaagacggtgatcatggagagcaccatcggcgacctcatcaagcc

SEQ ID NO: 8095 - DNA, 421 bp, Triticum aestivum
  Clone ID: LIB104-040-Q1-E1-A10
tagccgtcgtagaattcaagggtcgacgggagatacaaaatatattttcaaatatataggtcacgtgggcaatgccttggtgacggcaaaatgggtgcattcgtccggtgacacagatttgctatggccgcagtgacaaggtaggtatcagtttcgagatctacggtttcaagcatcagaaggtatctaaatagggtgaaccttgtcaaagaatggtcacatattatactctctgaatatcatcctactgaaagtaattgaagccttgccttcacgatcatcaaatggttgcatctctaacatagtggagcacaattttatgataacatagactcaaaaaaggaaaaatagacagagggtttagaaccctagacgccaccttctccacctcgctcctcctccgggtgccctgcactgctcc

SEQ ID NO: 8096 - DNA, 387 bp, Triticum aestivum
  Clone ID: LIB104-040-Q1-E1-A11
acggggcgaaaggaggtcaacggatggcacggaaaaacaggttgcgaagctgatggacgaggacatcggtgccgcaatgcaatttctccaatcaaaggctctctgcatgatgccagtctcccttgccatggctatctatgacacacaacattcacaggacggccaaccagtgaagcctgaacccaacaacactgcctagtatagtaacagcagctgcaacacccatccccgcagctgctagtaggcatgcatgaacctgttatcaaagtgttaagataaaaactgctggttctgatccactaactacaaggaggctggaaaagacctaaaggatcctctccactggaagttgtatcgacggtatatgatgtcacctactaacccttt

SEQ ID NO: 8097 - DNA, 408 bp, Triticum aestivum
  Clone ID: LIB104-040-Q1-E1-A12
tcgacaggggcagctcaacttcgcctcaacaccaaaccctagcctcctcctcctctcgccgccgccgccgccgccatgtcagggaggaagaagaccgcgagcccaaggaggagaacgtgacgctcggccccgccgtccgcgagggggagcacgtcttcggcgtcgcgcacatcttcgcctccttcaacgacaccttcatccatgtcacggatctgtccgggagggagacgctcgtccgcatcaccggtggcatgaaggtcaaagctgatcgtgatggatcatccccttatgcagctatgcttgcatctcaggatgttgctgtaagatgtaaggagcttggaattactgctctgcacattaagctccgtgccactggtggaaacaagacaaaaactccaggtcctggtg

SEQ ID NO: 8098 - DNA, 364 bp, Triticum aestivum
  Clone ID: LIB104-040-Q1-E1-A2
gggtcgacggcgcagcaatccttgagtaccttactgctgaggtccttgagctggccggcaacgccagcaaggatctcaaggtgaagcgtatcacccctcgccacctgcagcttgcgatccgtggagatgaggagctggacaccctcatcaagggcaccatcgctggtggtggtgtcatccctcacatccacaagtccctcatcaacaagacctccaaggagtgaatgaaatgcaataacgggtagttgttgtgcgttgtatcttcgtgatcccctgttatgttgtgctatctgttatgtgttgctattatcacaacctgaataggttgtctgaatttgtgatggggctagctttcggtaacttg

SEQ ID NO: 8099 - DNA, 378 bp, Triticum aestivum
  Clone ID: LIB104-040-Q1-E1-A4
cgggtcgacggggcttggtagaaggaggtcatgatgttgatattgcggaccttaaagtccagatgtcatcggctgttgtgttccttcaactttcatggctgaagtaaccttttgttcagtaatctgcgtaattgttttctgctttttttttgagcttgtatcatgaagagttgtagaataataattagccgcagatggttaagagaaaacaaagtgccggtattcaacaggtgctgatgctgaacttttggttaaacagagctcagtgtgctatgttagcaagggtgtatgaaaacccagcatcctttttttggatcccagtggtctctggttatgtagggtaaaaatgctatcaatagcagaattctggcttggtgt

SEQ ID NO: 8100 - DNA, 343 bp, Triticum aestivum
  Clone ID: LIB104-040-Q1-E1-A7
ttcatgtaatggtgcatgaactctctcaaaagacaactccttttgtttcggcgccggtcttgggatattgccatatttcctttcaactttcgcaaatcaacttgtcctcatctttggtgtatgatcccgtctgaatgctttcctccacttttgtgcattggtctttaaggtgaggtcatcaatgaacaacggctcctccttaatgtctacgccatcttcttcatcttcacaataaatgtcttcatgccatggctcgccttggtcgtcaatcacttcttgattgttgtgggtgccaatgtgctcgacaccatgatcttggctgtgatcgccttgacttttggtc

SEQ ID NO: 8101 - DNA, 367 bp, Triticum aestivum
  Clone ID: LIB104-040-Q1-E1-B1
gggtcgagggccgggcggcggcgaaaagttccactggtggtgcaggggccggatctggccgaaatcgggctgaaggcgggggagttcccttcgtctccgtgtgaagagaggaggagctacatcggcgtcgtgcggcggtattccccttcatcgccgtgcacgaggagtacccttaggctccggcggcgatcaaagagacggaatccatggcggggttgcagccgctcgcgccgcctgctcgcgacgtccggaccaactggctgctggcgcgctccgtgatgcaggtgctcttctcgaagcacggcgagctcaaacgcctcgacaacctgggtgcctccctctgcggcgccaggatcccctgcagccc

SEQ ID NO: 8102 - DNA, 255 bp, Triticum aestivum
  Clone ID: LIB104-040-Q1-E1-B10
cggggaccaggaacactcataagaaactacactacacgtaaacagttacaagaacctacatacatgttcgttccccacgctgatgttgctcttgtgtattgctgctgctgcccatcttttttctcatcccacataggcacgcagtggctgttatgcatcttatcgccttggctatcgcaatcctgaattctgtatctcattgcccatgccatcatcacgtgaatggtagcagaaaaaattaatcgtctttgaaaa

SEQ ID NO: 8103 - DNA, 389 bp, Triticum aestivum
  Clone ID: LIB104-040-Q1-E1-B2
gggcggaggcgaaaagttcactggtggtgcaggggccggatctggccgaaatcgggctgaaggcgggggagttcccttcgtctccgtgtgaagagaggaggagctacatcggcgtcgtgcggcggtattccccttcatcgccgtgcacgaggagtacccttaggctccggcggcgatcaaagagacggaatccatggcggggttgcagccgctcgcgccgcctgctcgcgacgtccggaccaactggctgctggcgcgctccgtgatgcaggtgctcttctcgaagcacggcgagctcagacgcctcgacaacctgggtgcctccctctgcggcgccaggattccctgcagcccgacggcgctggacctccactccggcagccatagga

SEQ ID NO: 8104 - DNA, 292 bp, Triticum aestivum
  Clone ID: LIB104-040-Q1-E1-B3
ggtcgagggccaggaaggtggcaatcgtgacggacatccccaagaatgcgtctggcaagatactgaggaaggatcttatcaagctcacgacgtccaagctgtgaaatgtcgaccgttatcctgctctgtgttatcctctgaaatgtcaattgattcatccttggatcctcatcattgtacaattattattttctcttttgcccttcgtcacaatagcactctgagtatctgtaactgaaggatttcagcggatgtgtagtacatgagaggtctctgtgtaaattggttctgt

SEQ ID NO: 8105 - DNA, 292 bp, Triticum aestivum
  Clone ID: LIB104-040-Q1-E1-B4
agaacaaagagaggccgctggtgctccgcaacaaggtcccgaggtggcacgagcagctgcagtgctggtgcctcaacttccgtggccgcgtgaccatcgcctcggtgaagaacttccagctgatcgcggcgccgagcctgttggaaccgcagccctctctcactctcggctagaggaagaagaagacacaagacacgagattttccggtcggcgcacgaacgccgccacgggcgcacgaacgcccgaatctttttcctctttgcaatgtctacatggtgctcaactcagtac

SEQ ID NO: 8106 - DNA, 385 bp, Triticum aestivum
  Clone ID: LIB104-040-Q1-E1-B5
cgggtcgacgggtgttgatagcttgggcttgactctgggtagcaaacatggtgttgatggcgctccatacttcagccggcgtctggagcgtggcgacctgccaaaggatgtcgcgagagagggagcccatcaagtagccttggagttgttgctgttgtgcgtaccagagggatcgtgcaaagttgaccacctattcgtctttgtcgtccttggtgatggtgagggtggccggtagtgccggactctttgcgtcaagatgatgttccatttgcgcgcccttgttctggggcagaatgatagccttccagaacaggaaatctcccctcaccaggttctcttggggtggcgatccgagaaaggaattgttggaagtggatgattgggc

SEQ ID NO: 8107 - DNA, 377 bp, Triticum aestivum
  Clone ID: LIB104-040-Q1-E1-B6
ccgggtcgacggggtacaaaatttgaggcacgttccatagatttcaggccatatattagtccaatctataaagctatattgggccgcttggcgaatcaagatcaagatcaggaagttaaagagtgtgccatatcttgcatgagccttgtgatcgctacttttggtgatggtctccagagtgaattaccgtcatgccttcccatacttgttgataggatgggcaatgaaataacacgacttacagctgtcaaggcatttgcggtgattgcgaattcacctcttcggattgatctgtcatgtgtcctggaccatgttgtttctgagctcacagctttccttcgaaaggccaacagagccctcaggcaggcaacattggg

SEQ ID NO: 8108 - DNA, 418 bp, Triticum aestivum
  Clone ID: LIB104-040-Q1-E1-C1
gggtcgacggggatgaggatggtgacttcgcggagggcggagaggaaatctcggaaggagaggagtatgacaaccccaaggccagtgacgccaagaagaaacaaataggcgagggtgaggagaatggcgaggatgatgaggaagaacaagaggagcaggacggtggaggaggtgacgacgatgatgatgatgacgacgatgatgacaatgaggacgacgacgatgatgacgacgatgtcgctgctgaagacgatgaggatggagtagaagaagaggatgacgaccaggacaacgacgatgatgaggaagacgatgacgaagactcgctccagcccccgaagaagaagaagaagtgaagcccttcgacgcggctgctttaggtcacatgcaatgagatgtgcctgttcttcactgtgtt

SEQ ID NO: 8109 - DNA, 387 bp, Triticum aestivum
  Clone ID: LIB104-040-Q1-E1-C10
gtagcgtcctacattcaagggtcgacgggcaatggaggatgtaggtgtgatatgtcaagtagtggacagataagccaaccactggatgtggttttgagggatttttgcagtggggtttgtacggtgctatgccgcgctgggtttgggatttgaaataaaacgaagggagatgtgccacgctcttaaatgccagtcttctgctctaatcttgctaaatttatgcatcttgttacatcttgcagccaaaaaaaaaaaaaaaaaaaaaaaaaaaaaaaaaaaaaaaaaaaaaaaaaaaaaaaaaaaaaaaaaaaaaaaaaaaaaaaaattttaaaaaaaaaaaaaaaaaaaaaaaaaaaaagggggcccccaaaaggttccaaccttaat

SEQ ID NO: 8110 - DNA, 429 bp, Triticum aestivum
  Clone ID: LIB104-040-Q1-E1-C11
attccagggtcgacgggtacctgatacccaagggggcgacggtgaacttcatggtggccgagatgagcagggacgagcgggagtgggagaagccaacggagttcgtgccggagcggttcctgccaggcggcgcgggcgaagctgtggatgtgaccggcaaccgggagatcaagatgatgccgttcggcgtgggccggaggatctgcgccgggctgggcatcgccatgctccacctggagtacttcgtggccaacatggtgagggagttcgagtggcaggaggtcgccggcgaggaggtggacttcgccgagaagaacgagttcaccgtcgtcatgaagaagccgctgcgcccacgcctcgtgcccccgaaggcctgagacaaagtccatctccatcagccagtaatcaaatccgaacaatagtccactc

SEQ ID NO: 8111 - DNA, 432 bp, Triticum aestivum
  Clone ID: LIB104-040-Q1-E1-C12
tagccgtcgtaaattcaagggtcgacgggagattctaaatatattttcaaatagacatgtcacgtgggcaaggccttggtcatggtgatatgtgtgtattcgtccggtgactcagtataacgatagcctctgtgcacagtgatgtttcagtttctacattgatggtttcaagcataagaaggtttcataattaggtgagccttgtccaggactggtcacatattatgctttctgagtttcatgctactgaaagtaattgaagctttgccttcgcgatgtaagaatggttgcatgctgttaaatagtggagcacatttttttgataacatagactcaaaaaaggaaaaatagacagagggtttagaaccctagacgccaccttctccacctcgctcctcctccgggtgccctgcattgctcctccggggcgtt

SEQ ID NO: 8112 - DNA, 293 bp, Triticum aestivum
  Clone ID: LIB104-040-Q1-E1-C2
cagctaaacccaagctccagtgcctacaaggtcatcatcgacttggtcgtcgaaaaatacttcagatagaatgaactaccagctaactatgagtggtaaaggaccaaaggggaaaggaggaaaaatagaaggaagaacgcaggattttgaccaacaatcagtaaagggttgacacgtgtcgcacaaatataaggatgaaaaatctgggactgaccaacaatcagtccacagattttgttttcagtttaggtcgaattttttgcccaataacgggttgacacatgtcgctgaaa

SEQ ID NO: 8113 - DNA, 408 bp, Triticum aestivum
  Clone ID: LIB104-040-Q1-E1-C3
gggtcgaggcgggatactaatcgagaggtctcgagttcaaatctctagctgatagaaaaattggtgtgttcctgttgattgggcctgatcggcaggaaagcccatctcagcctcattaatcttgcatctcgtcgttgccctacccatcgtagccccagtcccaacgccaggacgatggcggccgcgggacctcctatctgccgcattctgcggcagactggcggggtttcgcacagggtactctttctctgggccggcccacacagaagcagccggtggtgaaaaaaaacaacgcataaaaagatacatgttttgaaaacaaactgcattcgaacttctaaaaaagtttagatctgccgtggattatgttcttatagtgtttgctgcttaatattgggaaagaacgtt

SEQ ID NO: 8114 - DNA, 462 bp, Triticum aestivum
  Clone ID: LIB104-040-Q1-E1-C4
ggtccagaataacgggtcgacggcgcaggattgacaaaatgggctattgagctcttaccatttgatataacttacaaacctcggcgagctataaagtcacaagttttggctgactttgtcgctgaatggaccgaagccgaactccctaaagagtacggcgcatactccaattggattatgcacttcgacggctctaaaatgttagccagattgggggctggcgtcgtattgacgtccccgaccggggacacagtccaatacgtacttcagataatgtacacggactccaacaatgcagccgaatacgaggcccttttacatggtctccggatggcaatctccatgggcattcaacgcctagaggtgcgcggggattcaaacctcgcaatatcccaaataaacggagactttgacgccaaagattcgaaaatggcagcatatcgcaacgctgtcctaaacatg

SEQ ID NO: 8115 - DNA, 315 bp, Triticum aestivum
  Clone ID: LIB104-040-Q1-E1-C7
cccgggtcgacgggctatggtaatagttaatttgattctggtgaaaaacacaaactttgcgctcacgagaaaaaattcaataaatctaagaaatgtgcttttgcgtagattatttttgctgtagatcaatagacaaatttcctaatacttcctattttggtaggatttttggagttccagaagtattcgaaagttacagcttgctacagactgttctgtttttgacagattctgcctttcgtgtgttgtttgcttattttgatgcatctatggctagtatgtaagggtatgaaccatagagaacttggaatacag

SEQ ID NO: 8116 - DNA, 432 bp, Triticum aestivum
  Clone ID: LIB104-040-Q1-E1-D11
cacgggactccctaatttggtaggatttttagagttccagaagtttgcattaattacagattgctacagattgttctgtttttgacaaattctgttttacgtgtgttgtttgcttattttgatgaatctatggctagtaaaatagtttataatacatagagaagttggaatacagtaggtttaacaccaatataaataaagaaggagttcattacagtaccttaagtagttctttgttttctttctctaacggagctcacaagatttctattgagtttttgttgtgaagttttcaagttttgggtgaattctttttggtggattatgaaacaaagagtggcaagagcctaagcttggggatgcccatggcacccccaagataatccaaagacaccaaaaagtcaaagcttggggatgccccggaaggcatcc

SEQ ID NO: 8117 - DNA, 405 bp, Triticum aestivum
  Clone ID: LIB104-040-Q1-E1-D3
cggatgatgccaatggccctgcgtggaggcgcagttggcttcctgctttcacgtcatcgttcctgaaggtcgatgattctccttgtatgttcttgtatggatgcctgctttccttctgtcttctgtttgcaatgctttgctcgtcgtgaagacgaacagtacaaataacgtgttaaaacgtgaagatgaaatcgaatagagggcaccggcgggaattgatccaccgccggtggttgaaaaaaaaaaaaaaaaaaaaaaaaaaaaaaaaaaaaaaaaaaaacaaaaaaaaaaaaaaaaaaaaaaaaaaaaaaaaaaagaaaaaaaaagacgggaaaaaagaggagaaaaaaaaaaaaaaaggggggcccccaaagggttctaagttttatttcccggttaaggaaa

SEQ ID NO: 8118 - DNA, 431 bp, Triticum aestivum
  Clone ID: LIB104-040-Q1-E1-D4
ccgtcggatccaaggccgcgcacacgtccgcgggcagcaagaagatcgtgggcgtgttctaccaggccggcgagtacgccgacaagaaccccaacttcgtcggctgtgttgagggggccctcggcatacgcgactggctcgagtccaaggggcatcactacattgtcaccgacgacaaggaggggttgaacagcgagctggagaagcacattgaagacatgcatgttctgataaccaccccattccacccagcctatgttactgcagagaggatcaagaaggcaaagaacctcgagctgcttctcacagctgggattggctcagaccatattgatttgccagctgctgctgctgcaggcttgacagtggctgaggttactgggagtaacactgtctctgtggcagaagatgagctcatgcgcatcttgatt

SEQ ID NO: 8119 - DNA, 335 bp, Triticum aestivum
  Clone ID: LIB104-040-Q1-E1-D5
cggggaagatcagcccccggcgggaggagacccccgccgcgtcggtagatgagggaggaaggcagtggcgcagtcatggtttagatatgaaagttttggacaccgagcggaactcagtggagagcttatatatgaaaactagcgagagagagagagagagagagagagaagacgatatttatgcaattagaagagaactatagacattgtttttcccctaagctcaataaggtctgtgtcctttgtggactgcgtttcttctttgtagagacagaacataatataataccgaggattgcagtcaaatggaaattaatttcaggtttggaacttga

SEQ ID NO: 8120 - DNA, 274 bp, Triticum aestivum
  Clone ID: LIB104-040-Q1-E1-D9
acggggcgacatgagcatccgagtggcagtgcttcgcactttgagcagtagggatacttgatcatagggaaagggaagggagatgagttcgtgcttgcatgatttttagggaaagagcgtgtgtattgtacttctatgtgcatgaagtgttttgtttgggccaagcccaaataatgaaaataaaacactatctctaaaactattcaaatccttttgcatttattatcttctgcaaaaaaaggggaaacaaacaatcgacgagaggggcgagctc

SEQ ID NO: 8121 - DNA, 265 bp, Triticum aestivum
  Clone ID: LIB104-040-Q1-E1-E1
ggtccacggcgatcttgtggggcaattagcagacctgggcgaagcagattacacagccgtcaacagagctctgtgtgcaatgtgccagtacaatgccagcggcagctacgtggtctcggacctgtcgaacgatccagacatcaggaaggctaccatggaggacatagcgcatcaaatccgccagcaatggtcagctcaccgtccgacgtgatcaacctgtcgtactcagtacaaccagtggttttccatttgggggttcgtgaag

SEQ ID NO: 8122 - DNA, 454 bp, Triticum aestivum
  Clone ID: LIB104-040-Q1-E1-E10
taggcgtcgagaattcaagggtcgacgggggaaccgctacatcgcgccgccgaacctggcggcgaagctgatcacgaagcggctgtacgcggaggaggcggagtggaagaactgggtgtggcactcggagggggacctgatgctcaacgacgccgtcttcgccgacagcggcggccccaaccagaggaagttcgagaaggatgacctcatcccgcccaagccgggatcgtacgtcaccaggctcacgcgcttcgccggctgcttgccgtgcaagcccggcaagccctgctaaaccttggtggccccgccggccggccggagccgatcccttccgaatcttcaattctatagctttgttcaattcttttactcaaagattcgtgtatgtaatactaggacatttgagtagtctaccgggttcagatcagaaggccctgtaggttgttcctgtacg

SEQ ID NO: 8123 - DNA, 181 bp, Triticum aestivum
  Clone ID: LIB104-040-Q1-E1-E3
acggctacatgaaagtctgatcgattcgaagcaggttgagttcagttcagctagaggaagacgaacgcgtttcgatcagtccgatctcctgctccttttacatgatgattactattatcttaatcttagtgcatgtgtatgtaatatgcaccatgaattggtagtgcaaaaaaaagaaaag

SEQ ID NO: 8124 - DNA, 355 bp, Triticum aestivum
  Clone ID: LIB104-040-Q1-E1-E4
tcccttcaattatatttactttacatataagttttgtcttaagtcaaacttcgtaaagtttgatcacattagaggaaaaaatatcaatatttatactatcaatcaatatcattgcatcacggaattaattttcatattgtatatcttttctattatagatgttgatatatctttaatataaaactggtcaaaatttattaaatttgacttaaaacaaatttatatgcggagtaaaagagaaacagggggaggaagcggcgttctgtctccaaggcgcatctattcaaaaacttctgaatttttgtgtggtgaaagatgctttgggtccctgccaaatttatcttgtttggacatt

SEQ ID NO: 8125 - DNA, 447 bp, Triticum aestivum
  Clone ID: LIB104-040-Q1-E1-E6
cgggggaggcgacggtgcacttgtgacctcaaccaggcgagcactcctcctcctcgccgtcgtcgtctccgatccaccgccgcttccgcagccatggtgaacgttccgaagaccaagaagacctactgcaagaacaaggagtgcaagaagcacaccctccacaaggttacccagtacaagaaaggcaaggacagcctttctgctcaggggaagcgtcgttatgaccgcaagcagtctggatatggtggccagacaaagcctgttttccacaagaaggccaagacaacaaagaagattgtgctgaagctgcagtgccagagctgcaagcattactcacagcgtgccatcaagaggtgcaagcactttgaaatcggtggagacaagaagggcaagggaacatctctcttctaatctgatgataacaacgttaagtttaaaaagttgtgc

SEQ ID NO: 8126 - DNA, 104 bp, Triticum aestivum
  Clone ID: LIB104-040-Q1-E1-E7
gctatgacacactgacccttcccatatttgcatacatacgtttaaaatctgaaatattttacaacatcaggatgttctttgattcggtaacattcttatcgaat

SEQ ID NO: 8127 - DNA, 406 bp, Triticum aestivum
  Clone ID: LIB104-040-Q1-E1-E9
acggggctggttaaagaggaagccgaggcaccacttttcaacggtgaacccacccacagctcattctgcataacccaacagaccaagcaacacaaatccgattcattcccctcccaagctccaatcccgcgaattctcaagcgtggtcgtcatcatcatcacccagcatgatccgtttcatcctgttgcagaatcggcaggggaagacgcggctggccaagtactacgtcccgctcgaggactcagagaagcacaaggttgagtatgaggtgcatcggctggtcgtcaacagggaccccaagttcactaacttcgttgagttccgtacgcacaaagttatctacaggagatatgcaagactatttttctcaatatgtgtagatatcacggataaagatttggtata

SEQ ID NO: 8128 - DNA, 396 bp, Triticum aestivum
  Clone ID: LIB104-040-Q1-E1-F10
cgggctcctattatctttttgaattctccaaactacactatatcggagaagtttgtgcttattaaggattatattgatgggttgccttttactactacacatgatggttttgatgaatataatatgtatgtgcttgctgctcctacttgcaattattatgagagaggaactatatctccacctctctatgtttccaatacgataaaattgcaagaaactgtttatactatgcattggcctttactaagtgtgcatgaattgttcttttatgacatgccgatgcataggaagagagttagacttcgttgttacatgatatatgttacgttgtgctccccactaaattacaaatcactgttaattaaaattggctttgatataccttggaatccgggt

SEQ ID NO: 8129 - DNA, 296 bp, Triticum aestivum
  Clone ID: LIB104-040-Q1-E1-F12
cgggcaggttgcatagctgattggcaggatagtgaagtggctgaagcccggtgggcatattttcatcagggagtcctgcttccaccagtctggggattccaagaggaaagtgaacccgacgcactaccgggagccaaggttttacaccaaggtgtttaaggaatgccactcctatgaccaacatgggaattcctttgagctttctctggtaacttccaagtgcattggagcttacgtgaagagcaagaagatacagaaccagatatgttggccatgggagaaagtcaagtgcacag

SEQ ID NO: 8130 - DNA, 282 bp, Triticum aestivum
  Clone ID: LIB104-040-Q1-E1-F3
attgtctggctattcatgcaattctatatgagatgcactggacgttgcagctgctcgagtaatgatattgtttgagaccatgcgttgcaaggtattgagagactatagttacagcgagttgcggcagacaggggagagagaactgcatccgattggtttgttaggacatagataaggacatcatcagtatatgctctgaagattaggtaacttagcacagactttgcagtctacttatatcaggttgaaaccacgtcttcctgagattcaccgcccagtctt

SEQ ID NO: 8131 - DNA, 394 bp, Triticum aestivum
  Clone ID: LIB104-040-Q1-E1-F4
gtgcaggagtgtagaacacatgtaataggataaaataggatgaaattttattttggtcgattggattgtttagtttcttcacgcaaactttgccggggcctggcctcaaacacactactcaaattcagatttcattcatcaagtggttccgccacaaaatcgctgaaccgcaattcaaatgttgcatgcttgatgagcccactctgcacaattagctggagatgcgtgcgtgtgtgcagcttacaagttggaaacacagtcacagaccaaagctctggtgtttccccacctgctggctcagctcagacacaatttggtcactggactagagggaaacagacaatgcattgagctcacacaaaccaaaactttggcacaagttcatggatcactg

SEQ ID NO: 8132 - DNA, 304 bp, Triticum aestivum
  unsure at all n locations
  Clone ID: LIB104-040-Q1-E1-G10
taggcgtcgtaaattcgtagggtcgacggggaactcaataattctagaataagcaataggggatagtcgaattggtttnaacaccttcccgttgtgctcaatgnncaacccttcctttgggtattgtntnntagtaaacantnntttgcatgctgcccagttttgttgctnncgcaaacgatagggaactagttgcacttgaacacagctcaattctagggttnntctagtgcattggtttccttnngataatacgttggctttttgctttcgacatgtatttcgacagcaatttcaagtacac

SEQ ID NO: 8133 - DNA, 141 bp, Triticum aestivum
  Clone ID: LIB104-040-Q1-E1-G11
gatttaatgttgaattttgtgttgtaaagttttcaaggtttgagtaaagatttgatggattttggaataaggagtggaaagatcctaaccttggggatggccattgccctcaactggaacttctcccgcttcacgaactct

SEQ ID NO: 8134 - DNA, 453 bp, Triticum aestivum
  Clone ID: LIB104-040-Q1-E1-G12
attctagggtcgacgggtatgcaataactttggggtttatggaagtggatgcacaagcagtattcctgcttagtacaagtgaaggctagaaaaagactgggaagcgaccaactagagagcgacaacagacatgaacatgcattaaaattaaccaacactgagtgcaagcatgagtaggatataatccaccatgaacataaatatcgcggaggctacgttgattttgtttcaactacatgtgtgaacatgtgccaagtcaagtcactcgaatcattcaaaggaggataccaccctatcataccacatcacaactattttaatagcatgttggcacgcaaggtaaaccattataaactcctagcaaattaagcatgacattagcaactataatctctaattgtcattgcaaacatgtttcattcataataggctgaatcaggaacgatgaactaa

SEQ ID NO: 8135 - DNA, 375 bp, Triticum aestivum
  unsure at all n locations
  Clone ID: LIB104-040-Q1-E1-G3
gggtcgacggggtcaggaaaaagtggggcggtggcgtcatgggctccaagtcgcaggccaagaccaaggccagggaaaggctcatcgccaaggaggctgcgcagaggatgaactaagcctagccttatatgtgagagcatatgccatgtagtttccctttcagtgtgtcctgattttgacgaggaactcgaacccttttagcagcagtgtggaatcgtattgtggttttctgattctctgttcccttctccagacttatgcaaagatcagatgaggtttacccatgtttggattctatatagctttatgtcctttgtcgagtcaaaaaaaaaataaaaaanaaaaaaaaaaaaaaaaaaaaaaagcggccgctct

SEQ ID NO: 8136 - DNA, 207 bp, Triticum aestivum
  Clone ID: LIB104-040-Q1-E1-G5
cggggaagaatacgatgaataggaagaggaagaagaagaagaagaagaagaagaagaagaagaagaagatgaagatgaagaagaagaagatgaagaataagaagaagaagaagatgaagatgacgaagaagaagaggaagattaagattaggatgtataagaagatgaagaagaagaatatgaagcataatatgacgatgaagatga

SEQ ID NO: 8137 - DNA, 411 bp, Triticum aestivum
  Clone ID: LIB104-040-Q1-E1-G6
cgggtcgacggggtacccaactagttatgttatattacatgggtagtaagaaacatcttccagggagaatagttccgttaagggttcctttccctgggtaagcatgccctaaagtgcatgtccggactgcgataggaaacacaggaaaaaacatctgggggcagatatggaaaataaataaaaatcatctttttttcgccgaccaaatattcccttaagaacgctagcttttggcttcacccagtctgaggtacacatccggctgacccggcagtaacaatcgcagaggtgctccccttatgccctagccgaattaacaggaacgtagggcataaatacaagagccaggcaacccagcttggccaaaacttaagtcatatcgatgcatataatggcgaaaaaaggtacatg

SEQ ID NO: 8138 - DNA, 257 bp, Triticum aestivum
  Clone ID: LIB104-040-Q1-E1-G7
ccggtcgacgggccaccgaactcctccagcctccacctgcgattgttcaactagccctctccatgggctcctgttcaaccacccctccacgggctactgttcatccagctctccaccggcaactgttcaacccgccctccaccggctactgttcaaccttccctgcacaatctcttcgtgaatacccatttctctccttaggtttgttttctctcaatatccgatacacacacacatacacagatagagagatagac

SEQ ID NO: 8139 - DNA, 228 bp, Triticum aestivum
  Clone ID: LIB104-040-Q1-E1-G8
cgggcaagggtattcatcaaaacaaatccgaagcggtttcattcgatttgttgtgtactggatggtggaaaacttactccacagcatgcatttcaacaagatttccagtagcacgtgttaaggagtcgctccagcgtgatactgtggatgtcttcccgtgcacaatctcttcgtgaaacactagatctcctttgagctttctctggtcgcttcgacgtgcattggagc

SEQ ID NO: 8140 - DNA, 283 bp, Triticum aestivum
  Clone ID: LIB104-040-Q1-E1-H1
gttaattattttaagccagtgaaacttactaatagtagcaggccactagtacttacgttctgaggccatatatataggtaacaagtagtggcagaggccagtattttgccaacgccatatgtacaaatgtgttccgttttggctccacatgatttcccgtatgttcatatgaaatttaccgcagtgttcttttaaacatcagtgttgatacttgaaaaaaaacaaaaaaaaaaaaaagaaaaaaacagccgacctaagaagaatccaacaccgacgtccccat

SEQ ID NO: 8141 - DNA, 334 bp, Triticum aestivum
  unsure at all n locations
  Clone ID: LIB104-040-Q1-E1-H12
tccacgggggaagaagaangaggcggagggatggggcgcgggaagatcgaaatcaagaggatcgaaaaccagagcaaccgccaggtgaccttctcaaaccgcaagaacgggatcctcaagaaggccagggaaatcaccgtgctctgcgacgccgaggtcggcgtcgtcgtcttctccagcgccggcaagctctacgacttctgctcccccaggacctcgctatcaagaatcttggagaagtaccagaccaactccgggaagatactgtgggatgagaaacacaagagcctcagtgcggagattgatcgaatcangaaagagaatgataacatgc

SEQ ID NO: 8142 - DNA, 361 bp, Triticum aestivum
  Clone ID: LIB104-040-Q1-E1-H2
tccacggcgaggttgagaagcagattggcaggatagtgaagtggctgaagcccggtgggcatattttcatcagggagtcctgcttccaccagtctggggattccaagaggaaagtgaacccgacgcactaccgggagccaaggttttacaccaaggtgtttaaggaatgccactcctatgaccaagatgggaattcctttgagctttctctggtaacttccaagtgcattggagcttatgtgaagagcaagaagaaccagaaccagatatgttggctatgggagaaggtcaagtgcacagaagacaaaggctttcagagattcctggacaatgtgcagtacaaatccactggaatcctgcg

SEQ ID NO: 8143 - DNA, 340 bp, Triticum aestivum
  Clone ID: LIB104-040-Q1-E1-H3
attatgacatttacatagccattccgagatatattaccatgcaactttccaccgttcggtttattatgacacgcaccatcattgtcatattgcttttgcatgatcatgtagttgacatcgtatttgtggcaaagccaccttcataattcttccatacatgtcactcttgattcattgcatattctggtacaccgccggaggcattcatatagagtcatattttgttctaagtaacgagttgtaatattgagttgtaagtaaataaaagtttgatgatcttcagtattagagcaatgtcccaagtgaggaaaggatgatggagactattattcccccacaa

SEQ ID NO: 8144 - DNA, 455 bp, Triticum aestivum
  Clone ID: LIB104-040-Q1-E1-H9
tagccgtcgagaattctagggtcgacggggttggctcaggatgttatgtgcacagcctgtgagatggctgttgtgtggatagagaaccagctccgtgaaaacaaaacaaaggagctgatattgcaatatgctaaccagctgtgtgagcgtctaccgagccccaatggagagtcaacagtcagctgccatgagatgtcaaagatgccgaatcttgctttcaccatcgcaaataagactttcgtgctaacaccagagcagtacgttgtgaaactggagcaatcagggcaaaccgtctgcatcagtgggttcatggcattcgacataccgcccccacgtggtcctctctggattctcggggatgtcttcatgggcacttaccacaccgtgttcgacttcggcaaagacagaatcgggttcgcagaatcagcttgaggagtccagagcactatgaaatt

SEQ ID NO: 8145 - DNA, 406 bp, Triticum aestivum
  Clone ID: LIB104-041-Q1-E1-A11
gggtcgacgggacgcgcaagaggacatactgcaagatggtgcttgattactttcctgggaacaccgaggatgtcagacggttgccacgcaaacacgtcgatgttcgcccgcaggaaagcaacgagcgcgctttcctatttagggtcgagagtggcactgatggtgaaggtaccaccagtgccgtcctccttggcggacaccttcttggtctctggtggagctgccattgtcttcttacacttgccggtggagcttgatggtgcgtcctcgacggtagcgcagcactccgaagaggtgcgcttgccggagtgggcatcagaactcttgccggacttggccttcttcttccccccggaagcttcaacggcaagtgacttgcgatctgtttcgggtgctgcttcccggt

SEQ ID NO: 8146 - DNA, 402 bp, Triticum aestivum
  Clone ID: LIB104-041-Q1-E1-A2
gtcgacgggctgcaggctggtgtacgggatgatacgccgctttgtctcggccacggggtggccggtcagccgcatccagcgctagtagtgtaggctctagtgcctcctcctcgaattgaggtaacaacctgcgctttgggtaactcttggttgggcgcttgagtctgtattgctcgggtgccaggacctcagtccatctatcagttagcagatcttgatcagcttgaagttgttgttgctttttctttaggcattttgcagtggctataagccggcgcttgaagcgctgctgctcgacgggatcctcaggcacgacgaattcttcgtccccaaggctcacctcatctttggagagggccatgtaattaacatcctccgagtctcatacattgcctgtttttc

SEQ ID NO: 8147 - DNA, 388 bp, Triticum aestivum
  Clone ID: LIB104-041-Q1-E1-A3
gatcgaaaccaactatctacataattaggtactgaacattaggagtagagatagatctgagtcgcgccaccgcacctttctgcctcgacgccggtgactctcacgtactggcggcgccgtgacgctggaaagtttagcgaactccacacatccaaacagacgttgatccatcgacccgaaccaagaatcaacaccgagagctcggcgagatgatgtcactgaagccctctgcatccgccgccgccgaaggctgcaggattgcctcaacccctcgctccgcgctgacggcgaggtcaacaccattgcaagtaattaatattttgggaaacttcgttagaatttggtctgtgtattcgttgtatagccacttgtccagtactggggattc

SEQ ID NO: 8148 - DNA, 426 bp, Triticum aestivum
  Clone ID: LIB104-041-Q1-E1-A7
gcgggtcgacgggggtcactagatagtatcattgtaccttctctctttttctctcatttttttgggccttctcttttttatttccttcctcttttttcctcacttgggacaatgctctagaaaatgatgatcatcacatttctatttatttacaactcaatgattacaactcgatactagaacaaagtatgactctatatgaatgcctccggtggtgtaccgagatatgcaatgaaccaagagtgacatgtatgaaaggattatgaatggtggctttgccacaaatactatgtcaactacatgatcatgcaaagaaatatgacaatgatgaacgtgtcatgataaatggaacggtggaaagttgcatggcaatatatctcggaatggctatgggaatgccataataggtaagtaaggtggctgttt

SEQ ID NO: 8149 - DNA, 392 bp, Triticum aestivum
  Clone ID: LIB104-041-Q1-E1-B1
ggtcgacggggaacgtgctcaccatcttcgaggaggaaggcgggcggccggacgccatcatgatcctgacggtgaagcgcgacaacatctgcagcttcatctcggagaccaaccccgggcacgtgcggtcgtgggagaccaaggacagccagctgacgatggtggcggacgacctgaagccgcgggcggtgctgacgtgcccggagaagaagttgatccagcaggtggtgttcgccagctacgggaacccgctggggatctgcggcaactacacggtgggcaaatgccacacgcccaaggccaaggagattgtggagaaggcgtgcgtggggaagaggagctgcgtgctggccgtgtcgcacgaggtgtacggcggggacctcaactgcccg

SEQ ID NO: 8150 - DNA, 401 bp, Triticum aestivum
  Clone ID: LIB104-041-Q1-E1-B11
cgggtcgacgtcattcatcgtggccccgtaggggcacacgaagcccttgaacgccgtgcagcaccgccgctgcgggatcgcctgtcccaagcagctgccctgtaccttgcccatctgcttcaggtgccccaactgcaccgggcacagccctgcctccatgaagccccccagtttgcggccgggcgacggcgatgcctccgggggcgaggctaaaagggccgcatttgatatgatgagtggtttgtccgacgcggcggagccggcggcgacaatggacagcacgacgcaggacagaaggacggcggtggcgccggtggaacccatctatctctctctcttccacggcgccggagcaagaccgaactctgtatcttcgtgggaacgaagctgaggtgaccggg

SEQ ID NO: 8151 - DNA, 420 bp, Triticum aestivum
  Clone ID: LIB104-041-Q1-E1-B5
gggtcgacgggtcccgctgttcaggctactgcgcctccgacaacatcgacaccgaggacctcgatggctccggcgaaacaggagaagatgagtggcagattctctgaatgaaagggaagtttaacttcagttgttcggttaaaccttcacatgaccactcattgggttaatgtcccgctgtgtgaagtaaagacttcaaaaacctcgtgtgaaatccagggtttccagttctacggaacaagcgggtgtgctgcttgttccgcgtagctgcgagtccggaaaaggtaggaaccgttacgctgatcatcggatcggcaccaagttggttcgatgggaaattcctctgtaccataccgtacgcgctgttgtgggtgactgcaaaatgtatctattgattggttaaaaactttcccttggtat

SEQ ID NO: 8152 - DNA, 418 bp, Triticum aestivum
  Clone ID: LIB104-041-Q1-E1-B8
ggtctagaactcgcgggtcgacgggtatctgaagctagagtcttattcaccacatgatatgtgttttgcctggagcatcttgtatgatttgagtctttgatttttagtttaccacaatcatccttgctgtacaccccttttggagagacacacatgaatcggaatttattagaatactctatgtgcttgacttatatcttttgagctagataatttttctctagtgcttcacttatatctttttagagcacgatggtggtttattatagaaatcattgatttctcatgcttcacttatattactttgagagtcttttagaacagcatggtaatttgctttggctacaaaattagtcttaatatgataggcatccaagatgggtataataaaaactatcataaaaagtgcaatgaatac

SEQ ID NO: 8153 - DNA, 415 bp, Triticum aestivum
  Clone ID: LIB104-041-Q1-E1-B9
cgggtcgacgggaaacaccattatctatggtttaaaccttcttttctcacaacccaacgacgaggaccccttgaatcatgaagccgcggccgtcctccgggacaacccgcagaagttccagagaaacgttcagatggcaatgtcgggaggctatgtcgataacacccatttcccaaggtgcaagtaaggcggccgggcgggcctgctatgtgcttgcttctggcttgcgcccacctaccctaccctagccctgaatgccaaaccattgcacaatctgaagaaatgcgggcggcatacccaggaaatgtatctatcatacttgtttgtgtcaagaagatgtgactgctattgtgcttgtttggtggatgttctggaattgtcgtgtaacatgaagaagaaatggggtgacgttatg

SEQ ID NO: 8154 - DNA, 399 bp, Triticum aestivum
  Clone ID: LIB104-041-Q1-E1-C11
ctcgcgggtcgatgggatgctctaggttgaatcggaataaatttttgtaatggggttagtagggtgagagaggagacatggataattggtaccgctgctgcttactttgggtctgcggttgttggaggtggttgagactgctgttattagtctgttgtccgagctgtagagaactctttgctgctgctgttacttccttctgatgtttaaaaaaaaaaaaaaaaaaaaaaaaaaaaaaaaaaaaaaaaaaaaaaaaaaaaaaaaaaaaaaaaaaaaaaaaaaaaaaaaaaaatttaaaaaaaaaaaaaaaaaaaaaaaaaaaaagggggccccccaaagggttcaagcttaatttccccttcaaggcaatttaaaaccccttcaaaggttcccccaaat

SEQ ID NO: 8155 - DNA, 433 bp, Triticum aestivum
  Clone ID: LIB104-041-Q1-E1-C4
tcatgggtcgatgggatacctcatagtgaatcgtactaaacctattgatcattaacttagattttcccaagattttggctgctattccgaattactctattattccgaagccaatgaaaagtaagtagaacctacaaaaatggggttttctattgatgccttgaataacatatagcttacctatagacaaaaaataaaaaaaaaaaagtaattatgtttcggaaccaggcaaaaccagattgctgtgccataggaaggatagctatactaattcggtatactcaaaatacacctttggtacaaaattgacaatctcacaaggatgaaatatcagtaattttctatttactggtcgatcccatcttttacggaatcaattcctttttttgaatgtacaaaaattttgggagttcagcatgtctggaaacacggg

SEQ ID NO: 8156 - DNA, 420 bp, Triticum aestivum
  Clone ID: LIB104-041-Q1-E1-D1
gtcgacgggcataacaaactgacatctgatggtgccatctcagtgaatgatgcacagacagctaccgtcaaggccgaagaaagcaacgcaaacaaaactaaaggtcctgtggaggagagcagttgatttatctcctgccatttactagtttggagcagctatgatttgatgctcgtcaggagttgagaacggaaaaagatgccgattcgagttcaggcgtgggctgctgctgcttcagttgtgaacatcatagtccttatttcgcctccacttaggttatagtttcaatatcatagttccaaaattcttgttcgtgggtccttgcttccgtgttctttcttgttttcttctctttatttttttacttgtgttgtgtcgtgaatgctgttaagttttagtggccttctcaactccttttgg

SEQ ID NO: 8157 - DNA, 443 bp, Triticum aestivum
  Clone ID: LIB104-041-Q1-E1-D10
ggtctagaactcgcgggtcgacgggggtggtcaaagaaactggatgcatgttttcattatttctggtgttcgttgtactgccatgattgcagatgaatagatatgaagttttctcgcaaaaaagaagtaagaggtttttcaatgttatcgctgtaacgcaagaataagagtcagttcttttgctagctcctagaataaactgaaacaagttgtcccttacccaacttattctaaaaatccaaccaaatttatctttttagaagcctactaattaaagacttaactagtaggattttaaaatttatttttggttaggttcctagaataaactgggtaggggtagcttattttacaagcccgaaaaggccacaaaaagaatagcccctaaggcacgttgctttgattacaactataacataattcaagtaatacactttgcaaag

SEQ ID NO: 8158 - DNA, 444 bp, Triticum aestivum
  Clone ID: LIB104-041-Q1-E1-D11
ctcgcgggtcgacgggttgccagaacgggtttcgcataagacgtgtttggaagtcctaggccaaacgagtatttcacggaaagccgacaaggaattccgttaataaccgaccgttttgattctttagaacaactcgatgaatttagtagatccttttaggaggccctcaatgaccatagatcgaacctatcctatttttacagtgcgatggctggctattcacggactagctgtacctactgtttttttcttgggatcaatatcagcaatgcagttcatccaacgataaaccaaattccaactatagaactatgacacaatcaaacccgaatgaacaaaatgttgaattgaatcgtaccagtctatactggggtttattactcatttttgtacttgctgttttattttccaattacttcttcaattgagaaaaagaaagagact

SEQ ID NO: 8159 - DNA, 429 bp, Triticum aestivum
  Clone ID: LIB104-041-Q1-E1-D3
gtcgatgggcatccctaaactgagtcgtaatattcgcgacatggaaaacactctcctccaaattctacaatgctttgatgaaggtgtatgctgatcaaaaccttttcgagaagggtaaggagctagcaaagcgcatggatgaggatggttgcagactaggcatctcaacaattgattcgctggtgaagctctatgtgggcgctggagaggtggataaagctgaatctatactgcacaagctgtctaaaagtaacaagatgaagcctcagtacagctcatacctcatgttgcttgatacttattcaaagaaaggggacatccacaattcagagaaggtgtttgaccagttgcggcagatgggttataatgggagggttaggcagtaccagttgctgctaaatgcatatgtgcaatcaaagacacccgttt

SEQ ID NO: 8160 - DNA, 77 bp, Triticum aestivum
  Clone ID: LIB104-041-Q1-E1-D8
gacgggtaatttcatatactaacggagcttatgagttttctgctaagttttgtgttgtgaagttttcacgtgttgga

SEQ ID NO: 8161 - DNA, 394 bp, Triticum aestivum
  Clone ID: LIB104-041-Q1-E1-E1
ggtcgatggggatcacgataatgagtcttactatgcctccagttgatgagaaaaagaaggtagttgaagatgttgacaaggatcgaagatacgcaattgatgcatccattgttcgtattatgaagagccggaaagtcttaggtcaccagacactagtaatggagtgtgtggagcaacttggtcgcatgttcaagcccgacttcaaagcaattaagaagcgcattgaggatcttataaccagggattacctggagagggacaaggagaacccgaacgtctaccgatacttggcttgatcatcggttctccatgctgggttcggtaacatctggcgtgtatgcctaccaagctactgctatttaaggatgctatattttgtgccatggcacaccac

SEQ ID NO: 8162 - DNA, 421 bp, Triticum aestivum
  Clone ID: LIB104-041-Q1-E1-E11
gtgaatcggaatagttgtatcgcgacctgaatgaatgaaataaacgaaataacgctcttgttcaaccgtcaaaaaaaaaaaaaaaaaaaaaaaaaaaaaaaaaaaaaaaaaaaaaaaaaaaaaaaaaaaaaaaaaaaaaaaaaaaaaaaaaaaaaaaaaaaaaaaaaaaaaaaaaaaaaaaaaaaaggggccgcccaaaaggatcaaacctaacttacccgggaaggaaaattaaaaacccttcaaaagggccaccaaaattaaattaaagggccgtcgtttaaaaaagtccgaacgggaaaaacccgggggtaaccaaattaaacccccttgaaaaaaaaccccttttcccaagggggggaaaaaccaaaaaggccccaaacaattccccttccaaaaatttgccaaaccgaaaagggaa

SEQ ID NO: 8163 - DNA, 406 bp, Triticum aestivum
  Clone ID: LIB104-041-Q1-E1-E4
gtcgatgggctgcggtatatcgactcgtctaatccggtggtctccgcggtccatttggtggccgaaatggccaaaaccactcccgctgccgcgtcgggctcgccggcggctaaacgccggcagccgactttgactttgacccccggtgggccctggttgactcccctgagtcaatgacaggtggggcccagccctgttaattaaacaggattagttttaattaaattttaattaaaataatcaccctgacatgcgggacccactgtcaggtttgacccagacctgttcagttgaccactgacgtcacactgacgtcaggctgacgcagtaattgattttctggatttaaattaaatcaggaaattccagaatattatttaaacttcaaaaattcataacttttaat

SEQ ID NO: 8164 - DNA, 338 bp, Triticum aestivum
  Clone ID: LIB104-041-Q1-E1-F1
cgggccaggggaagatgaagcttatggggacgaccgcgctgattacaggaaatctgaacccactacctacatcaatgctcccttggtaagggttcttgcctacttcgttggcaacccaaacccaggccatatcagacactgagcataagcactttgccatgtagacagagaagagtgacagaagctataaatacgtacacaggaagcaaataggtttgtgattggatggcactacatgttcataggagtggattgcagagcatgtgttctaccaataatgacagcttatctttcatgatttttcttttgtttgggtttgcactgaattttgttttgtg

SEQ ID NO: 8165 - DNA, 450 bp, Triticum aestivum
  Clone ID: LIB104-041-Q1-E1-F12
ggtcctaggttcccgggtcgacgggggaacgatgagatcatggctaggggaacttttgccaacattcgtattgtgaacaagttcttgaagggagaggttggcccccaaaccatccatgtaccatcaggggagaagcttgctgtttttgatgctgctatgagatacaagaacgaagggcatgacactatcatcctggctggtgctgagtatggcagtggaagctcaagggattgggctgcgaagggtccaatgcttcagggagtgaaggctgtgatagccaagagttttgagaggattcaccgtagcaatctcgctggaatgggcatcgtccctctatgcttcaaagctggggaggatgccgacactcttggcttaacaggccatgagcgctacaccatccagcttccgactgatgtgaatgaaatcaagcctggccaagatgttacggtc

SEQ ID NO: 8166 - DNA, 404 bp, Triticum aestivum
  Clone ID: LIB104-041-Q1-E1-F2
tcatgggtcgacgggttccttgaaaggaaatgcttggatgagggtctggattgcgacactatttcaaggatatgccagacgtacgacttggacaaggttgatgtcctgaagtacagggatctggagtggcctagctcagcttctcgcactacctagggattctttgcccaccgatgtctgtacggtaaaacaactctactggatgataactgctggagggtgatcaggctggatcttttttgcttgggacatggacatttaaccggcatggcggatcatgcggtgcccgcattaatctgccgctagcttagaaagctgagaaacgaagaggacctctgaaaccgtagcaaccccatatggtgacccccgttgctctgtacccagagtgtaaatacagtttggtg

SEQ ID NO: 8167 - DNA, 141 bp, Triticum aestivum
  Clone ID: LIB104-041-Q1-E1-G1
cgggcattcaaaactcgcaatatcaaacataaatggagactttgatgccaatgatccgaaaatggcggcctatctcaatgccgtccttaaaatgtcagctcggttcgtggggctggataaggttggaccccttagaggggg

SEQ ID NO: 8168 - DNA, 387 bp, Triticum aestivum
  Clone ID: LIB104-041-Q1-E1-G11
gggtcgatgggattcccaaaagtgaatcgtagtattcgaataaaattggaggacagcaaccaggttcatgggcagcagctctgggagcacaacaacaatgtactgggctaggaacgtcagccggaagtgcagccgccgatgcacggcggcaatggatttttccacccccttgatgctgctggtgaacgcacacttcacatagggtaccctcctgagtccatgagtaactcatgcatgacaactttcatgcccccgtggttgccttgattgaagactgcgaataaagtgcgacgaataagtatatacgtggcacccggccggccgcatatatgcatgtatactacttcgagtgatggattattccagtcaagatcctcaattattttg

SEQ ID NO: 8169 - DNA, 395 bp, Triticum aestivum
  Clone ID: LIB104-041-Q1-E1-G4
gtcgatgggcttcccgagaatgagtcgtattagcgtcaggttggcggggactaaagctggtagactgtttgaatggaaggctctgtgctgcaacaaaaccttgccctagtagctatatgcaatgcttagcactgaactgctgtgacaatgttatgttaccgtaacatgtgtgggctatgtctgcccattgtgttgtgctactactgtaaaccaattgcgtggttgcgttagtttgcttggaccattgcttgcatgcagctacaagttgctaatgaataccctactctaacctccttttgtgagcgtggtgcaggacattctgccgataaaaaaaaaaaaaaaaaaaaaaaaaaaagaaaaagaaaaaagagaaaaaaaacccgaagaaaaaagga

SEQ ID NO: 8170 - DNA, 397 bp, Triticum aestivum
  Clone ID: LIB104-041-Q1-E1-G9
ctcgcgggtcgacgggaggcgtgaagtttgctcatagtcggttttctcaacggcggtcccacatgaaagtgaaaatgctaggcaacacgccttccctaagctatgtgtcgtgccggacgggccgtggagtactcccaattcccgggcgtgtgggggggagtgcgacgcgaacgcggcaagccttttccttttactagcaatgtgctcgtgtgttgcggcggatccaaagtagtagaatagtaatacttgttcacaaacttgaaagaaatcactcttgttttgatatactcctaatatattactccctctattcctaaaaaaaatgtctttttagagatctcaaatggactatcacatacggtttatatggacatattttgaagtgtggattcactca

SEQ ID NO: 8171 - DNA, 404 bp, Triticum aestivum
  Clone ID: LIB104-041-Q1-E1-H1
attctagggtcgacgggatgttcctaaaaataagggtgaatcttctagtaagaaaaatgtggatctcaaatcaataagtgttcatcccaattgtctctctatcattaaggaaccttttgctacaaatgaatttctcaatttcttgcctaggagtttaatcattgctaaaaagaaagaaactcctaaaatttataagtgctctgttgaagaatttaatgccaaagatggcactacttagatctgttctcgcttttatgcctagctaggggcgttaaatgatagcgctagttgggaggcaacccaattttatttttgtttcttgctttttgcttctgtttagtaataaatatttcatctaccttctgtttagatgtggttttatgtcctaattaatgtttgtgcca

SEQ ID NO: 8172 - DNA, 133 bp, Triticum aestivum
  Clone ID: LIB104-041-Q1-E1-H12
gggatggggcgcggcaagatcgaaatccagaggattgagaaccagagcatcacgatgtgaacttctccaaacgcattaacgggatcctcattaaggcaagggagatcaatcgtgcacggcgacactgaagtcg

SEQ ID NO: 8173 - DNA, 406 bp, Triticum aestivum
  Clone ID: LIB104-041-Q1-E1-H2
gtcgacgggctcatcaagccgccggtcgtgtcggcaaaatacgcatcaccaccaccaccccagttccaaggatattaagcatggcatcatcgaaacatcgacgaggagcgaccaattaaggtttaacacaacatcgcgtgcacatgcacagatgtacctcattaatttggaacgtgcatgcatgcatgcatgcgtcgagacttattattaattatgtgtatgtctgtgcgtatgtgcgactgcaaagtgtatgaagggaaatagatgttatctatgatgcctttttttttgtttttggaagtgggcaattttattaaagcatcaagcaactttttttttttggaaatgtgatccataatgccgtatgttgtgcttttccctttaggacaaatgtaattctttcctt

SEQ ID NO: 8174 - DNA, 413 bp, Triticum aestivum
  Clone ID: LIB104-041-Q1-E1-H3
ggtcgacgggctcaacgaaataatcaaatacaagggattccaagtacctcctgcggaactcgaagcccttctcatcacacacgccgaaatcaaagatgctgctgtcgtatcgatgcaagatgaacttactggtgaagttccagttgcattcattgtgcggattgaaggctctgagatcagcgagagcgagatcaagtagttcgttgcaaaagaggtcgttttctacaagaggatccacaaagttttcttcgctgactcggttccgaagagtcctgctggcaagatcctcaggaaggacctgagagcaaagcttgctgcaggcatcccaagcagtgaaagcacacagtccaaaagctgagtcgcatcttacacacacacacacacacacacacacacctctgtccaaaatcatg

SEQ ID NO: 8175 - DNA, 398 bp, Triticum aestivum
  unsure at all n locations
  Clone ID: LIB104-041-Q1-E1-H4
ccaatgttcgaagggcgtcgatgcaccggatcgggtccgcgggctgggtcacgaccgtgacgcgacaatgacaggagctgcagcaactacggcgatggtgggcacacggcatgtcgcagcgggcgcggaggtccgtgatgacggcgagcaggcgacacatcacagcgtcgggcaaaggcgtggcacggcatggtagcatggaggcgctgcacggcgatggcggaggctgcggcggctcggtgtgacggccatgtagcgatgacgagccgtatcaagactacgggggaaattgttagccatagtcttgatcttgcatctgttangggttgttagttgcacgcgttgtgtttgttagcagctagctccatgcatggaaaacagcaccgctccaaaaccct

SEQ ID NO: 8176 - DNA, 419 bp, Triticum aestivum
  Clone ID: LIB104-042-Q1-E1-A10
cgggcattcgttcaccttgatttcgagtgtgaccacaagccagagcactcgatcctcagcaagcttcctagcagccagccttgattaccatccgaattcactgtggaaaacgcaagatgttggatattttgcttgccgtgcaggattcgctacagtacttggtgtcttgcattgttggccatctaaatgagataagcaccagcgttggagactgtatagacttgtttcgcggagccctctaaatgtcgtgtttcgagtaaaagtaggttatttttgcttcttgaagctgtcattgtttgtctgcgatgagggctgcaatgtggaaatgttagctacaaaaagaaagcaagcgatttttgtgtgctcaaaatcagttttgtgaactaaggtcgcaaggagcgagctagcccacccgggct

SEQ ID NO: 8177 - DNA, 452 bp, Triticum aestivum
  Clone ID: LIB104-042-Q1-E1-A11
ttcgccgggccacgggctacagccaacgttgaaacgaggcgagcatcgagggaaccatggagaacgtcggggaagcgatgtcgcgccatctggcctcctcttgcggtgggagaacgaatactcctgtggctctggctggctctgcaccctcatgaacggcacaccatactcgatcgattcgttatcctctgggtgcttgaccttcgacctgtacgccccccacctccgcctgactatcgcctcgggtgaatctgtctgctccatcgcccataggagatactcgatgaactcggaggactgcaacgtgactgccgccgaggagtacatgtacatcacccgtcctcatcgccgccatctcgctctttcgcatacattgccacatggcccgcaccgtcctcgaaatctcccactcattgtcaaaccaactaaggatctccttcaacctagctaac

SEQ ID NO: 8178 - DNA, 411 bp, Triticum aestivum
  Clone ID: LIB104-042-Q1-E1-A12
cacgggctctatgtgattcacttatatcttttgagctaaataattttgctctagtgcttcacttatatcttttagagcacggtggtggttttgttttatagaaattattgatctctcatgcttcacttatattattttgagagtcctttagaacagcatggtaatttgctttggttataaaattagtcctaatatgataggcatccaagatggatgtaataaaaacttccatataagtacattgaatactaagagaagtttgatacttgataattgtttgagatatgaagatggtgatattagagtcatgctagttgagtagttgtgaattttagaaatacttgttctaaagtttgtgattcccgtagcatgcacgtttggtgaaacgttatgtgatgaagtcggagcatg

SEQ ID NO: 8179 - DNA, 342 bp, Triticum aestivum
  unsure at all n locations
  Clone ID: LIB104-042-Q1-E1-A3
tcgacgaagcgaattcccggtcccaagggccacttcggttgtacgtgaccgaaggtaatcacaaacgggtgtcgtgccccgatcagccgattcgggaacacgactctgttgatccgtgcttgtcgcacgatcagtagcaggcacgtactatatatatgtcgtacgtttggtcatattgagtgatgaaatgtatttacggttgtcggtggtcggtggtctaactaacaaaatgtatgtttgactctctgaaatgagtaaggagatccattgtaatccaaatacagataaagctattcggttcgagaaaaaaaaaannaaaaaaaaaaaaaaaaaagcggccgc

SEQ ID NO: 8180 - DNA, 278 bp, Triticum aestivum
  Clone ID: LIB104-042-Q1-E1-A4
gggtcgaccggtggactaaaggataaggagtggaaagagactaagctgggggatgccaaaggaacccaagattatattaaaggataaccaaaagcctaaaccttggggatcccccggttggaacccccccttcctcctccgtcaaccggaaacttaacttgggccaaaattttaatccacaaaattaaaagtggtttaacttgggcaacaatttcccctggtccgaattgccttgcggtaattaaaataaaggttttgcaccttaatttccattaaaa

SEQ ID NO: 8181 - DNA, 428 bp, Triticum aestivum
  unsure at all n locations
  Clone ID: LIB104-042-Q1-E1-A5
gtcaacgagcggtacagagaatattgcttcgattcattcgtatcccagaaaacatcacactctctcgctcgagagcaagaacaccagataatacaaccagacaagcagcagtaggagtgttatctctccggagagctccgaagctgggtaaactgctcgtgtgcctcgccttgatctgctcttcgtgcgacctccgccccccgccgaaccgaaaggggcccggtccgccggccccataggtgttcgcggatcagtttccccgacaaagtatgtgagttctttattactaatgtttagtccatatattatacacactctcaaccttccaccattgctagcctctctagtatcgcgcaactttcgccggtaccgttacaccaccttataccttcctcanaacagccacaataccttactactatgcattt

SEQ ID NO: 8182 - DNA, 413 bp, Triticum aestivum
  Clone ID: LIB104-042-Q1-E1-A7
gggtcgacgggcatggccatagctcctgctgaaacatgggcagtacggaaagcctgctgaaattgatcccatgtgacagtgtctactggatatgtggctgtgaaattctcccaccatgatgttgcgggtccttcaagctgatgtgcggctaatcgcaccttctctgcatctgtgcatcctgcagtggtcaactccctagctgtcttgcgaagccaatcatctgcaacaatcggctcagtgctaccggagaacaccggcggattcagcctaagaaaacgggttaagtgatcaacaggtggtggtggtggtgggttgttgttgttgttcccctgattctaattttggactagcaactgcatcaaggcattctgctactggatcaactgagtgagctcctggtgggaaaagaaatc

SEQ ID NO: 8183 - DNA, 378 bp, Triticum aestivum
  Clone ID: LIB104-042-Q1-E1-A8
cggacgtaactaggactttagaggcattctctctaacacctcacatgtgctgatgcaggcagagatggcggagcgtccgctggtggctatcatggtgagctggtgtgctaccacctcgcccacggccgcaggtagcctcctccccggcatccattgtcatgaaccaggactgaatttgagtaattagatacaattctcagacgctacgatttggaggagaaactcgagctcgagtccttggagcaagaggaaggaagaaatgagacagggtctcgttacattctcgataccgagtcagacgggagctcatatacggcgctctaggcgcccgtttgggaagtggcgctcacgcagccgcgaatttgcgccggcccaacg

SEQ ID NO: 8184 - DNA, 341 bp, Triticum aestivum
  Clone ID: LIB104-042-Q1-E1-B1
caacatgaacggatacctcagctacctgtccctcgagtatgacttcgtctcggacacaaatcctgcttgggtatcttcattttggaagcaggaatcctttcctcataagatggatgacctgtagtattaggaattcatgccttccagctctaattttttcgcattgttggtgtatgctgggagtcacattattatgctgctagcaaacagtaggattggaagtcttactctgtaggttagtaatatcttttccactataccgaggttcagcaatttaattcgtattaaggtcacacaagcagtttggttttcagatttgtcttgacaaacatatttggttc

SEQ ID NO: 8185 - DNA, 411 bp, Triticum aestivum
  Clone ID: LIB104-042-Q1-E1-B10
ggggatcaacgtacagcagcaactcctggccgcagcccaagtccctccgcatgtacgcagttctaagacctcacttctctcacttctcaacacctctccctcgggaacaatagccgccgcgggcgcatctgcagcagcggtatcctcaccaggagatcgatatggtgtttgtgtctatccaaaaaattagggcctactccaagcggttccaagtgacgttcaggagatggagacaggggactaccgattacagggccaggctcaggctcatcaatcaagacaacagcaggtataacagatccaagtatcggtttgttgtactatttactaacaaagatgtcactgcccaaattgtgtacactaccattgctggcgatatcgtgatggctgctgcctattcccatgagcttc

SEQ ID NO: 8186 - DNA, 408 bp, Triticum aestivum
  Clone ID: LIB104-042-Q1-E1-B12
cgggtgcaccatgatggtatgagatagtccttggttgatttatagaatgctcattgcacttcacttatatcttttgagtatggctttatagaatgcttcatatgcttcacttatatcatttgaagtttggattgcctctttctcttcacatagaaaaccgccatttatagaatgctcttttgcttcacttatatttgttagagaatgggcatatcttttgtagaaagaattaaactctcttgcttcacttatatctatttagagagatgacaggaattggtcattcacatggttagtcataaaatcctacataaacttgtagatcgctgaatatgatatgtttgattccttgaaatagttttgcgatataaaggtggtgatattagagtcatgctagtggacgactat

SEQ ID NO: 8187 - DNA, 410 bp, Triticum aestivum
  unsure at all n locations
  Clone ID: LIB104-042-Q1-E1-B2
gggtcgaccggtggtcgtacgtacaactatggctattatctagcggatgtcatctatcaaaagtggaaaaccttcgtaaaccaattgaaaaacccttaaggtaaaaaaattcttgatttcaacaatgctaaggcggcggcaaaaaaaaatttggagaaagcattttggattttgcaagcccaatttgctattgtgagaggaccggctagattttgggatcaaaaaatgccctggtacatcatgtacgcttgtgtgatcatgcacaacatgatcatcgagaatgagcgtggccaagagatttagactactcacagtatgagctcttgggacatcccgtgcgagtgcgacggagggctgaagggtancccgttttgttgcctcctatcatgccattcggtgtcccgcaacgc

SEQ ID NO: 8188 - DNA, 415 bp, Triticum aestivum
  Clone ID: LIB104-042-Q1-E1-B3
cgtgcacaaataaatatgtcatgtgaaaatttggaaaatttcaggggtcatttgacctattaaagacatttacgtgattttctaaccatttaatgaccgtaattcaaatttaaactacatctacatgcaacgcctaaccataacggtttgaaaaagcttatttttacgtacttgtgcgcgagttaattccatgtgcagcaaattaaaagggattttcaaacatgttggtctcaaagcatgggcacatgcatacgtatggctggagtgacatggcatattaattcaaaaaaaataaaacatgatcaaaaaaacttgaaaccttgcttgatttaatgtcatgccaccaagatgatgtggtaaagaaattggcatgtttgacgaacgtttggacacacaaccctcacaaaccggagca

SEQ ID NO: 8189 - DNA, 384 bp, Triticum aestivum
  Clone ID: LIB104-042-Q1-E1-B4
cggtcgaccggatgccggatacatcatcatcggtaacatcggtgaccattggagcgacatccttggcgcgcctgagggcgcccgcactttcaagctgcccgaccccatgtacaacatcggctaggccactccggcttgggcatgccgccattgagttctcgaataagctggacgctcttagttatatgcatgtttagtcaataatccctccccagttgttgcttggttcatttccattgttgagaacttgagattaattgccattataggatgtgttcatggagaagttgcatgttgcttaatctatggatccacggtccactatttttcttcttgcgagaaaagtcatgcaacaaaaaggatgtgcgaaataaattggcatgt

SEQ ID NO: 8190 - DNA, 363 bp, Triticum aestivum
  Clone ID: LIB104-042-Q1-E1-B5
gggccgacgacgacctctagggcccacagagagagtcacacatgagtgtgtgtcataggacaaaaccaccgcgtgtatgtgcccgtgtgttatgtgatgtttgaatacccaatgcacaactttaacgtggcacatgcttcacaaaccggaaacgcactacaccatgatgcgtatctccctcacttcaagccggtgggagagcctcatgtgtacgcacgtgcccgaactttaatatggaatctcaccatgatccacaccacacgcatgccaagatgaatccaccttttggtcaaatgcctctcgttgtcggtggaaactacaaacctttgcgggctaacgaatgggcacgtcgctgataccgca

SEQ ID NO: 8191 - DNA, 375 bp, Triticum aestivum
  Clone ID: LIB104-042-Q1-E1-B6
attcgccggtcgacgtggaggcgtactggccggggaggcgtggtaaacccccggagtgttacgcctctcttaagacggatcaccatcgccttatggagaaagcattcagacccttcatctttgccatcctctttgcaatcggctcctccaagaaactttccccccctcctcctgtagaaacccagctagctagctagctagcgtgcgtacgtctccggccccaacattcattccatgtgagcacattatattatattggaggctcctttttttcttggtttgattatttttgttaactcacattcacatatcacgattggatcgagtcggatttctaaaaaaaaaaaatgcaagtcacacacaccacacaaatga

SEQ ID NO: 8192 - DNA, 151 bp, Triticum aestivum
  Clone ID: LIB104-042-Q1-E1-B9
ggggatcaaagtaccgcagcaaaccctaaccgcagcccaagtccctccgcaacgacgccgttccaaaaccctcccttctcccacttctccacccctctccctcgggaagaaaagccgccgccgccgcatccgcagcagccgcatccgcagc

SEQ ID NO: 8193 - DNA, 377 bp, Triticum aestivum
  Clone ID: LIB104-042-Q1-E1-C10
cgggagaagaggtcatagggtacctagggtttatgacgtctcgttgtttttgcaagctagcatgtgactccgggatgcctgttttaagatttcgcttgtgttgaaagatattattatttactgcttgtagcctacctgggataccatcatattttgctgattatggaactacttttatcctgcttaagttctgtattttgcccgatttgaaataaaaaaaaaaaaataaaaaacaaaaaagaaaaggtaaaaaacaaaaaatcgaaaaaaattcaaaaaaaaacaaatacagaaaaaaaaaataataaatcatcaacagaaaaaatccgggccacccaaagggttcaaaccttacttacgcttgaaagcgacttcaa

SEQ ID NO: 8194 - DNA, 410 bp, Triticum aestivum
  unsure at all n locations
  Clone ID: LIB104-042-Q1-E1-C11
cacgggggggaagaacacggcaggtcggggtcgtggcggtaggcgccagcgcccgtcaggcagctgttctggaaggtgaggcgcaccgtgctacggctgaagcgccgcactgcgagtttcgggtataaacgctaaagctataccagaacttcaacgacagtctcgtcactgcccaacgcctctagctatccacacccgcaggccgcatggtcttgttcctcgtcttcgcaattttttacttgccgcacggtcggaccactgcatgaggctggacattttgaagcgtgtccacaacttctgatatgctcctcgatctcagctaccagtgttcgagtattagattgtactgttcgtacacaacttgcatagtgtacanaatgacacagtgtatataatgtacctccatcctt

SEQ ID NO: 8195 - DNA, 438 bp, Triticum aestivum
  Clone ID: LIB104-042-Q1-E1-C12
taccggatcgaaattcgcggggtcacgggaagtgtcaccggactcaaggaagggctccacggcttccatgtgcacgctcttggcgacaccaccaatggctgcatgtcaactggaccacacttcaaccccgctggtcatgtgcatggggcacctgaagatgaaatccgccatgctggtgatcttggaaatgtgacagctggagtggatggtgttgctagcatcaatattactgactgccatatcccccttactggaccaaattcaattgttggccgtgctgttgtcgtccatggtgacgctgatgatcttggcaagggtggacatgagctgagcaagagcactggaaacgctggtgcacgtgttgcttgcggaatcatcgggctccagggctaagatgtcatcttcgccgaccaacgtcgtacagatatgggaaccttt

SEQ ID NO: 8196 - DNA, 335 bp, Triticum aestivum
  unsure at all n locations
  Clone ID: LIB104-042-Q1-E1-C2
ggctgataaggagaagaggcaccgcacgcttcagtggatcaagggcaaggtgcaaaaaagaatacagggcggccccgccggcgacgacgcgactgccgggtattgattagccaggccccgttcccggcgggcggatggaaatggatgcatggatgtccggtcgattgactgggcgatctcttgtttcctgtcgtttaaatggttctgtacatacaggtttgccgtttgattcacggttgacaccaccacgtagatcatctagcgttcagatctctgcttattgattggttctttgtacaaaatataanantaaaatctgtaaaaaaaagcggccg

SEQ ID NO: 8197 - DNA, 333 bp, Triticum aestivum
  Clone ID: LIB104-042-Q1-E1-C4
acggaaagcacaggaagaaaccctccgtgcgttcgcgacaacggattcttggtcaaccgggaaacccaccacttcggtaaacaattaggcggtaataccataccagacagaaaaattgagagtgcattgtgtgctacctttattttttcatttcgttttggcgaaaataatggaatgcggtaaggggttggttccaggtcccggtattagaaattcattgtagggcatcatgcctcattaattgtgaattgtgatcactcattttgaataacagaattcattccaaaaaaaaaaacgaaaaaagaaaaagacgcaaaaaaaaaggaggaagag

SEQ ID NO: 8198 - DNA, 432 bp, Triticum aestivum
  Clone ID: LIB104-042-Q1-E1-C6
attcgccggtcgacggggatgataacatcgtggaccatcgactagatcataaaggccagtatttgcttcgtgttgacatgaagagtaacgagatccagatctctccacagcctacaaggcgtatttgttaccaactctttgccagcgagttcagtgcgtaccgacagcatttacaggattgaccgaagagagatagaagcaagagagttcggtgcgagtggaaagacgttgaagatttgagatgttggcaacataacatgtggaactggtacttaaagtccactggagacatttactgttgtcattatctgatgttagtagttataaactgaatggtgggtagtatgtgttttcactcatggctttatgtctactgagtggcttgttttggatttgtaactggtaatggcatgtttacttttgtgactgctg

SEQ ID NO: 8199 - DNA, 131 bp, Triticum aestivum
  Clone ID: LIB104-042-Q1-E1-C8
ttcgcgggtcgacgggtggtactatgctgcatgttgacagactttaccttcaaatgaagataatacttgttttcgccttgtactttttgccacgatcaatcagttaattatcagagatacatgttcagctt

SEQ ID NO: 8200 - DNA, 432 bp, Triticum aestivum
  Clone ID: LIB104-042-Q1-E1-C9
gggagccttcaaatctccccttctatatcaccggtccggcggagtgcgagtcccaccgggactggtgtgcccgccatgggaatgagaggatgagggcagacaaggcccgcctcgctaccggcatggcggcggcagaggcggctgatacagcggcacgggcggccgcataagaacgagcacgcctcgcccgagagcagaatcgagtggtccgtgccatggccggactgccacccaagaacgagaaggtggacagcgacgggtcggacagcttcggcaacgagcagatccggctaaatccgtactgagtcttcgactggtacttccgcgagaaagacggcaatggcgcgtatccgggaagggcaagggcacccgtggatgatcttctccgccatagccgaacatgccaaattttggtagtccaatggaatgttg

SEQ ID NO: 8201 - DNA, 420 bp, Triticum aestivum
  Clone ID: LIB104-042-Q1-E1-D1
gggtcggccgggaagttgaccctagtcccggctgaagaatgtatttagtcatttagtgtcgatgcaaggcagtaaccatttcttgtcttcatcctcgtattgtatagcatatagaggtacaagggagagagagagagagagagagagagagttacactgtaacaacatacatttgggatcctatctatcagggcgcgggcacgtagtcatactgcatggatagggacgtgcgtttagcatccaggagaagttgttttcagcataaaaatattcagtctaacaccgatgaccacgacaacaatgtccttctcttcttcccctacttctcttgggcgtcatcatcggcggctggcgagcacggctgagtgatatatggtcacgggctcacggcctagttgttgaacttgaggcatgggcggg

SEQ ID NO: 8202 - DNA, 434 bp, Triticum aestivum
  unsure at all n locations
  Clone ID: LIB104-042-Q1-E1-D10
cgggcggtgctgaagtgcccggagaagaagatgatccagcaggtggtgttcgccagctacgggaacccgctggggatctgcggcaactacacgtttggcaactgccacacgcccaaggccaaggagattgtggagaaggcgtgcgtggggaagaggagctgcgtgctggccgtgtcgcacgaggtgtacggcggggacctcaactgcccgggcaccacggccacgctggccgtgcaggcaaagtgttccaagaggcagaggaccgccgagcaataagtaacctaagctcacatatgtactgctatgtagatgatctcatcaccttgaccttttgcctttttcatgcttgttctttgggatgcgtgcatacgtgttgtactcaggttgttgattcctgtgaattgttctangagtagatggagcgctgagatgag

SEQ ID NO: 8203 - DNA, 444 bp, Triticum aestivum
  Clone ID: LIB104-042-Q1-E1-D11
ccacgggggaaaaaggattcatggtctggttcatctcactcctcagctgcggaaagaacactgccattccaggtaaaaggtggggaatgggaaattgacaagcggcttctgaagatgggagagatgattgcttctggttcttgtggagacttgttccatgggacttactttggcgaggatgttgctgttaaagttctaaaagccgagcatttgaataataatgtttggaacgagtttacacaagaagtatatattctaagggaagttcatcataccaatgttgtgcgattcattggtgcatgcacaaaaccaccaaaattttgcataattacagaatacatgtctggaggaagtctgtatgattatgtgcacaagcagcgtaatgtcgttgatctcccaactctgctgaagtttgcatgtgatatatgccgaaggatgtgttac

SEQ ID NO: 8204 - DNA, 305 bp, Triticum aestivum
  unsure at all n locations
  Clone ID: LIB104-042-Q1-E1-D2
ccggtcgaccggtggtctaagaaatacatcatangcggcaatgtgataaagcatcagtatattagaaataatacagaattaaaaattttaacttgatacacgaactacaaatttaaagaactactaaagagccgcccgggttaataaaactgagaaaattaactcggaaagaaattttttggaagctccgttgcgggattcagacctaaccattcaaggagaagcagtgggaacgacagaacctatgattccatangattttattgacaagaatcctaacacttcattgggtgggatggcggaac

SEQ ID NO: 8205 - DNA, 315 bp, Triticum aestivum
  Clone ID: LIB104-042-Q1-E1-D3
aatttgttaatccatcaatatctgcagaatggtgttgacttatactttttaacttgtcactctagcttgggatttagaggaattatgaagggccgcccgggttaagagaactgataatattgactcggaatgaattttttttgcaactcggttgggggattcatacttcaccattcagggagaatcagtcgtatgtatagaagctattattcaataggtttttattgggaagactccttgtacttcattgtgcaggagaccgggctgcaacttaagcagtgtcttaattggttcatgaaccagtgtacgcggaac

SEQ ID NO: 8206 - DNA, 429 bp, Triticum aestivum
  Clone ID: LIB104-042-Q1-E1-D5
cgggtatatgaacagtgttaatgaagcatttgaaaaatattaaatgtgtatagaaaaaatgttgtccacatattaaaaagatgttaatcttgtattggaaaatgtcaaattatgcatttgaaaatgttaaatgtgtataaaaaatgttgaccatgtatttaaagaatgtcaatcgtgtatttcgaaaatgttaatcatgctttagaaaatgttaaccgtgtgtagtaaaaatgttgaacatttataaataaaatgctaatcttgtattttagaagtgttaacaaggcatttgaaaaatgctaaatgtgtatagaaaaaatgttggccgtgtattcgaaaaaatgttaattttctcttcaaaaatagttaaacatatatttaaaaaaatgtattagatatgtaccaaaaacctacaatgtgtaaggaaaa

SEQ ID NO: 8207 - DNA, 414 bp, Triticum aestivum
  Clone ID: LIB104-042-Q1-E1-D7
attcgcgggtcgacagcgagagcaaatgtttgacggaaacgatgtgtcagatggcatgggcttcggaatgctaaccgagggtgagagatccttggtcgagcgcgtgaggcaagagctgaagcatgagcttaaacaggggtacagagaaaagcttgtggacatcagggaggagatactgcggaagcggagagccggtgagctcccaggagacacggcgtccactctgaaggcgtggtggcaagcccacgccaaatggccgtacccaactgaggaggacaaggcgcggctggtgcaggagacggggctgcagctgaagcagataaacaactggttcatcaaccagcgcaagcggaactggcacagcaaccctacctcgtcctcgtcggacaagagcaagagaaaaaggaacaatgc

SEQ ID NO: 8208 - DNA, 426 bp, Triticum aestivum
  unsure at all n locations
  Clone ID: LIB104-042-Q1-E1-D8
attcgcgggtcgacgggtgatccgaatgatgattgtgatatcaagattaggagggtgaatgttagagctaatcttgatatttgtattagcatgtttgagttttgcatgtagtctagtctagtgtggtgttcgtccgacgaaggtttcaggtgagcgcgccaaggaggtgagatgccaggatgccgtgtgaggcggcgagcacggcgagatgccgatggtgctgcgtgagaagcggcaagacgtatcagaggctggagccgtgatggactgcatcaaattgggtcgggtgaaccggccggtcgttctgtttgttggactagctgttcatgcgtgagttcgtttagtcctagctgagagtatcgttgctagtagttgatgcatgcatgtagaanaaaaaaaaaanaaaaaaaaaaaaaaaaccggccg

SEQ ID NO: 8209 - DNA, 403 bp, Triticum aestivum
  unsure at all n locations
  Clone ID: LIB104-042-Q1-E1-E1
gatgtccaatgaaccgacgacgcaaagaggaacgtgccgccgcacgtcttggctaaacggcgccgaggctccccggaaggtcgacggcggcctactccatgtgcaccggcaaagggaggacgctcaaagggcgggaccttcgcaacatcangaacctcgtcctcaagatgaccggattcatcgagaaatgaaatggactcaacaccgtgggatgtggatacattgcttcgtcgtccatggacgtgtgtgaaagtttgtggcaacctaattaaagttttcagtgagcgcagaggtgaagaaagataagagatgtagtaataactctctgtttaattaattaaatttgtctgtttagtcgaattttgcatgtgtantgtgcgagcagcttgctcaagaataaatg

SEQ ID NO: 8210 - DNA, 140 bp, Triticum aestivum
  Clone ID: LIB104-042-Q1-E1-E10
taccggacctacattcgccggtccacggggagaagggaccgttgtgtccatcgaccaggatgatccactgagtttacaaaccgtttgtccctatttggttgcaccaaccattgtcgggaattttgtgttaacaatgggcc

SEQ ID NO: 8211 - DNA, 434 bp, Triticum aestivum
  Clone ID: LIB104-042-Q1-E1-E11
cgggggcgtcgcattttaaaatctgataaattcaagtccctttttgatttcttagacgttggcaggacttgcaagccagaaacctacagactggtaaggacataccccaggcgtgcttttaccactgctgacggcgaccaatcgtttactgatctcgggttaacaagcaagcaggaagccttatttatagagcagattactgattaggggaaaaagattgagcctcacctagggataccaccatctgagactgagttggggttttacatgtctatacttgcatatggcttttactagggaatctaaaattggtctgtgtcgaagagttcaaactgcgttcttttgtgatgtggaacggttcgcatcactttagtcttatgtagggggtataaaacagtgatcagcaacggattcaggatatttggttatgaatg

SEQ ID NO: 8212 - DNA, 349 bp, Triticum aestivum
  unsure at all n locations
  Clone ID: LIB104-042-Q1-E1-E5
gacggggagtgcaacgaaggtgccatggccgccatagcccagtctgcgccggattctgtgctgatgacattggcggagtttgagacggcaagacaggcgtggaatgcactcaaagagatgaggattgaataaaatcgtgtcacgaaggctcgggcacaagtgctgaagcgccaatttcacaagttgcagatggagaaaactgaatcggtgaacgactatgccatgcgtctgactactttggtgggagagatccacgcgcttggtgcanagctcgacgagaccgagattgtggagaagtttttcagtccggtgactgatanattcacgtacatcatcggcacgctcgaac

SEQ ID NO: 8213 - DNA, 362 bp, Triticum aestivum
  Clone ID: LIB104-042-Q1-E1-E6
tcgacgggaaggcgccgtttgcgaggctgatgctgcaggggaactacctctgcggagccctgccgcgtgagctgaggcagatgaaggagggcggtgttatggtgagcctggcggacaactgcttgctcaagtgcccgcacaagttcttcttctgccaggggccgccgcagaagaaccgtgacacatgtcccaagtgcgaaccatgagaggttccatactgtagataacgcattcatgtcgtataccttaatttcatcgggtactgtatttcatcgggtactgtccggatgatgaactttattgatcgaataatactacataactttgcttgaacgcggttaacatgccaaaagtggattgct

SEQ ID NO: 8214 - DNA, 353 bp, Triticum aestivum
  Clone ID: LIB104-042-Q1-E1-E9
cggggcgtagtgaatgagatgtgctgccatacattgtattagctcggagagagcaaatggatcggatgtacctttgtgtgatgagtgtaattaagctgtgaccaatatgtacacggccgcatgttgcgttgcgtgggtgctgtcgccgttcttgtgtactccattgttgtgctgtgatcattcctttgaataaatcggctcgatcttcactttaaaaaaaaaaaaaaagaagaaaaaaaaaaaaaacaaaaatcagtataccggacttaatcagacatccaataacattaatcggccctccaagaggatcaaagctaacatactccggcaagctaggtcaaagctctcctaaa

SEQ ID NO: 8215 - DNA, 356 bp, Triticum aestivum
  unsure at all n locations
  Clone ID: LIB104-042-Q1-E1-F1
tctgaagatttacctgaacagaacacacaagatcttaagccagcaccgggggacaacatatcttctagaaagcccatggttgaagaaaagttgaataaaggagatacacagcctactgatatgtcaggcgcgctctccctctccctcgcatttccagcatcaaaggatcaataggctggtaaaatgcaaccggaatcgcaaagaagcatgagatgagcagtangaatataccgtcttcgattatccagtgatgatggctccttgcctttgcattcctgatgtcttgcgtgatgcaaccttgtagcatcaacccactgcacaaggagtctgcctaaaacacaactatcttgtcaatg

SEQ ID NO: 8216 - DNA, 384 bp, Triticum aestivum
  Clone ID: LIB104-042-Q1-E1-F10
tccacggggtccaattgatgcgggcccaacgtttggtactagctgaatctcaggtcacacatataaatatcagttccaagggacggtctcaatgcaccaaaccaccatgtactcctacatggcctcgcaacgatagctttaccacaacgtcttcaatacctcactctcattaacgacacatgctttcagtccaattgaggaccctgatgaatcagagcttatacgattctaatcgttgcaagcataacattttaggaatacagtatggctcagacagctcctacacatgctagtgcgtttcatcgacttactgtggcaatgacaagtcatgcataagaaagtgggtttaactaccgcagtatacactaatttgaatcgcattgt

SEQ ID NO: 8217 - DNA, 464 bp, Triticum aestivum
  Clone ID: LIB104-042-Q1-E1-F11
taccggatcgaaattcgcgcgggccacggggacacgccaagtgggcaaagtcaccagacaacgcaggccactataattctgaaccaaacaacactggatttttctgtgatggaggagattatgatagctattatggccggttctttctcaactggtatgcccaggtgttgctggatcatgcagaccgcgtgctgatgctagccaggttggcctttgaaggctcagctattgctgtcaaggtgtcaggcatacactggtggtacaaaactgccagtcatgctgctgagctgactgctgggttctacaacccatgtaaccgcgatggctatgctccaattgcccaagtattgaaaaagcatggtgcggctttgaacttcacctgcgtcgaactgcgcaccatggattagcatgaggtgtaccccgaggccttggcagatccagagggcttggtatggcaagtgctg

SEQ ID NO: 8218 - DNA, 424 bp, Triticum aestivum
  Clone ID: LIB104-042-Q1-E1-F12
cctatggaaaaaaagggatgaagggagatctgaaattgcttctattctgatggatattgaaggtatctccggaggctttcatagcttcaatgtggctaatgtaaggcaagaggctaaaatggcacatctttgtgccggtcgagctagtcgtactagaagaagctgcttgtggattaattttattcctagctttctcacatctttgtgctatcttttctgccaacatttctaatcagttgtattgagctatataaaaggactattcttgagtgtgataaatacatgatgcattgcttttgcaggggtaaagacttggaaaagaaaaatccctcccttggcagcttggggcctcatttgtaaacccaaatatcaaggatgggtttttgcatttcaaactttgaggctcagaatgatgctttgctat

SEQ ID NO: 8219 - DNA, 221 bp, Triticum aestivum
  Clone ID: LIB104-042-Q1-E1-F2
cgggtcgaccggcggcaagacgcaccgcaagcagctggccaccaaggcggcgaaggaatccggccccaacaacgggcggcttgaagaaccccaacggcaaaaggcccggaaccgtggccctgcgtgagatccgcaggtaccagaagagcacggagctgctcatccgcaaccggccgtccaagcccctgatgcgggagatcccccaggacttcaagacggac

SEQ ID NO: 8220 - DNA, 391 bp, Triticum aestivum
  Clone ID: LIB104-042-Q1-E1-F4
gggtcgaccgggagcatgatgtagccactgacaccacggtgctggagctcctcaagggcctgcagtttcatcaggctcctcgcctacgtcgccaacctcttcttcaagctcaagacgcatcgccagctcttcgagccgcaggaaattgagggcggcaatgatgataaggaaaaggcggtcctcggctttgggagcgcgctcttctggctcatcctcatgaccatcataatcgccgtgctctccgagtactttgtcggaaccatcaagccgacctcgcattcgtggggtctctcggtaagcttcatcagcatcatcctgctccccatcgttggtaacgcggcggagcacgccggagccgtgatcttcgccctgaagaacaagctgggcatca

SEQ ID NO: 8221 - DNA, 357 bp, Triticum aestivum
  Clone ID: LIB104-042-Q1-E1-F5
ggcaagataacacgcaggagccgagtcaatgtcagtgtcgggagcgccctatacatattcgggggagatttgccctacgacactgttgtccattggaacaaggagcaacacctggttagccaacggtgacaaggtcagatgatccttttatagagcatgttcaaaagttcagggctcatgtgggatgcccacctgaccatacgtcaggttatcaacctttgatgtttgcgggacattgtagtgtgaacattgtgtgtgtcctgtataacatgtctaagctgaaacggtcgtctgaaatcgatgtggtataggaccatgcggtagccatccagagttcttcacattctgatcgtagtg

SEQ ID NO: 8222 - DNA, 261 bp, Triticum aestivum
  Clone ID: LIB104-042-Q1-E1-F7
tcaacggtaacgctgccaaaacaccacagaagacgggcccgttccaattgcgaatgttggaaaagaataagaaattagctacaagaaaggaagggaaaattccaaccaagactcccccgcccttaaggttttaaaacaagcccgttaacattgggaatttccaagatttcaacaaatccggttggaaaccttccccggaaccttccaagtttccccggaaccggctcaaccaccattccattgcgccaaccttttgccaaa

SEQ ID NO: 8223 - DNA, 439 bp, Triticum aestivum
  unsure at all n locations
  Clone ID: LIB104-042-Q1-E1-F9
ccacgggaggtgtttcatcttctaatggaggttccagaaacttctagagccttccacaaccctccagaggttttctagggttgtcctaaactttttggatctccgctttttctcggtttccttcataacattttcttttcttccaaaacttttctggtgcaattcacataagctcttgcacttctagtactcaacaaatcgatgatccttaagcgtgtgtcctggcaggttcggtaaatgtagacaagacccggaacaccttccggtcaatggccaatagcagaactgtggacatccatattgtcccccctacacttacacgaattattatcgagtgaacctattgttctgacacacaattccctttatttcacaatataacataatcaaaggtgatacttattggtatccatgtgaagcaactcatgatcanncatac

SEQ ID NO: 8224 - DNA, 181 bp, Triticum aestivum
  Clone ID: LIB104-042-Q1-E1-G1
cggtcgaccgggatcaatcattcataagcaaagagtagaataatcctaaggaccaagtaaggcgaatccaacctccaaacctggggagccggtggatcttttttgcaaaatgaaagcaaacttgtccaacaaaaaaaaagataaaaaaacgtaaaaaaaaacgggcggtccaaaagattca

SEQ ID NO: 8225 - DNA, 443 bp, Triticum aestivum
  Clone ID: LIB104-042-Q1-E1-G10
attcgccggtcgacgggaaatcacaaaagcgtttttttgatctgaattttttacaaaatattgatatagaaattgcctaggttttcctaagttttcaaaaaaattggagttacagaagtatacaaaattttcagattactacagactgttctgtttttgacagattctgttttctatgtgtcatttgcttattttgatgaatctatcggtagtatcggggggtatgaaccatggagaacttggaatacagtaggtataacacaaattaatataaatttagaatgatttcacaacagtacctaaagtggtgatttattttattatactaacggatcttacgagttttctgttgagttttgtgttgtgaagttttcaagttttgggtaaagttctgatggaccacgaaataaggagtggcaagagcctaatattggggatgccca

SEQ ID NO: 8226 - DNA, 412 bp, Triticum aestivum
  Clone ID: LIB104-042-Q1-E1-G11
ccacggggaggtgacggtggctacgggtttcacggcggtgcgggcgcggctgcatcggccatggtgggagaaggcgagggagaggaccagggggagaaaggaggtgtcagcaaggtcggggcgacatccaggaagcgatccacgtggcgggacggtgtctagggcatagtagagaggcggggtggtgcgtggcgagctcaggcgcgccggtgctcacctccctgcctgcctggcgggaggaagcagctgactggcgtgggccagcgcaatgctgggacgccaggtgggctcccaggtaagtttccctctctctcagttttctgttaatgtttttctatttttctgtaacttctgggctttattaaaaataccaaaacgttttcaaaaatcctgaaaataattgttggctctg

SEQ ID NO: 8227 - DNA, 438 bp, Triticum aestivum
  Clone ID: LIB104-042-Q1-E1-G12
gggattgatagaattttcacagttacaccagcatattgcttggggtagaatcagttatttgtaggcacaggtaagggaactcaccgagagataaacaatgtattcctaaggtcctcacgattcattacagttactttgttaacttgcaatgttaatcatgtgtatgtgcatgatatcacatatcatctgaataatatcgatcagagtcttatgttatgcagaccatcacagtgcaggataaatgatcaagttggtcaaactaccaagaaaatatttcagctatccacaaatgaaatatcatggaggataaatatctatgtgagggagtgcgaatgattggaatcttcataacaaggtaacagaaaatccattaatataggcaactggtagaatttggtgggtgtgcccggtcagtctactttcccatgtgttttacat

SEQ ID NO: 8228 - DNA, 292 bp, Triticum aestivum
  unsure at all n locations
  Clone ID: LIB104-042-Q1-E1-G2
gcaaggtgagaatagaagttggtggataggggttgaatggagacgcttaagaagcggcggggagccctgctagagccccggaggtgacaaagacgcagagttccggcaggggtgtggtgttgtggccggggtggtggagcggcagcgaaggcaagagagaacgaaggaaggagagaaaatgagtaggatggagtcacggagtccgggaagggttttgggtangatggggtgtcggattcgtatgtttcgcatgtccggactcccgcaaactgggcccacttttgtctccgat

SEQ ID NO: 8229 - DNA, 337 bp, Triticum aestivum
  Clone ID: LIB104-042-Q1-E1-G4
ccgggtcgacgcggagaaggtaacaccaaaggaaaagaaaacacgtacacagaaagtgaatatagaagtgttcaagactgtgaagcgggaggttcctggtatatctacgtttcattgtacttagttaagttgatgttactgttgttttttctcgctgccgccatgccatgaacaggcgaggcaggcagcttctcaaacttgtgttgttgtaacttgtatgatgggagcttaagtacattactttgtttcataatacaccatgttctcgccaaaaaaaaaaaaaaaacccaaataaaaattggaaaataaatacaattggaaaataaagccttccccc

SEQ ID NO: 8230 - DNA, 393 bp, Triticum aestivum
  Clone ID: LIB104-042-Q1-E1-G6
gccgacgggcaaaatgacggaaaacagaagactttcccactagaagtaaaaacagtgaactcacttcatgtgataacacgaaaacatagtgcggcatctgctataccaagacaccgtccgcagaatggggatagaccctaccaaaattcgccgtagcagcacttccttcaaaggagtgacgccaggcctttacaccaattgtacaggctctgtactactagaggttgtgttcggttcatccgacaacctccatcgcgaaaagctcattttccatatcgccccattcaaaagtggccatcaagcactactgggacgcgaagctttcgcccgctttaacgcaatagcgcattacgtgtctcttacgcttaaaatgcccggtccacgcggcataat

SEQ ID NO: 8231 - DNA, 416 bp, Triticum aestivum
  Clone ID: LIB104-042-Q1-E1-G8
gccgacgggggcggtgatcatccaggtgaaccccttcggcaagatggagcacatcggggaggtggacttcgggacgccggcggtggacatggggctcaagtacatggcctactcgtgcggcatggaggagagcacgctggtggacacgctcgggcgcgaccacccggcggtcaaggacccggagtcgatccaccgcagcgggtggagcaaggtggcggagtactacctcggcaagcaggacgtgaagctcgacctccagcggttcgagccggtgctcctcaaggccatggccatgctcagagagtagccgctccgatcgagcttgcagccccggcgcattggttgattcgcactagcgtagagcagttccatttcttctaatttattcctattaattttacatatttttgggtgga

SEQ ID NO: 8232 - DNA, 438 bp, Triticum aestivum
  Clone ID: LIB104-042-Q1-E1-G9
ttcgcgcggtcgacgggccagcactgaactgactgtattcattccaaaacaacctatacgtatatagggcatccccaaattagtaccacctcgtttatattatatcttaaatataaaatcacctaagtgggacgaaaccaagaatatcaccttgctttattagtaggtatagatatagatatagatatgtaattttatatcatttcttgaactaatctattaactcagtgcccagtgccattttctgtttttgcctatttatttgtttcacagaaaaaccataccaaacgaagttcaaacacgatgaaattttatgataatttttcctggaccagaagagaccctagaagctttgagggaggctagaaaatatacagagagccacaaggtcatacggagcaccccaaggggtgcaccacctgagcttgtgggcccctc

SEQ ID NO: 8233 - DNA, 426 bp, Triticum aestivum
  Clone ID: LIB104-042-Q1-E1-H1
cgggtcgacgggtggtacaaaacagagcatcgagtgaagcataattgcgtaatggcaagaagttgcggagagatggcgcactggccatctcacaaccatattgatggcgcactggaaatcttctcaggcaaatactgtaatagccaccaatggtttgatgacattgcttattgcaagacttgaccatcgaaaagttattgcttgtttgactctgctgaaactaataaaggtttggtttttattcttttctctcatggttgagtgattctacttgtcaagtaaccaacaacgtttttagagtaagcttagaattttgggtcactcatgataaattaagccgggaattaggttaataaaaactaaggcgggaattttggatactctgtatcattgaagtgttccatgttgtcgtgtacaatgtgagac

SEQ ID NO: 8234 - DNA, 435 bp, Triticum aestivum
  unsure at all n locations
  Clone ID: LIB104-042-Q1-E1-H10
ggtccacgggatccaccttttgccggattattaccaatataatcataaaaggctaatttttcgggaattttagaccaagcttctgataaactaagattttcggctaaaccattgctaactcttcgatatatttcttgctgaaagtatccctgatcccactgataacgagtaggcccaaataattcgattggggtcgttgctgacccataccacatagttccagcaactacgaaagctgcaaaaaaaacagcagcgatactactggaaagtacagtttcaatattgcccatacgtaatcctttatatagacgttgaggcggacggacactaagatggaataagcccgctaatatacccaatgtacccgcagcaatatgatgagaagctattccccccggaacaaaaggatcananacttctgcaccccacgctgga

SEQ ID NO: 8235 - DNA, 371 bp, Triticum aestivum
  Clone ID: LIB104-042-Q1-E1-H12
ggtccacgggaggatttcgttggcggggttgaacctggcgaagtgcgagcaccttgccgatgccatcatcgactccttccacaatgtcaactagattatgatttgcgtcgcggccacgctactgcgattagttccttccatagtttgctgggatttttgggtccttccagctcgagtttttagtcgcgatgctgatgacgtgtccggtgattcagaggtacagtaataaataatttggcaaaactcagggatgctaggcgctatgcacttgtaccgttttgcaagcttgtaatgctgattaattatgtatgatggcatctccaattaaaaaaaaaaaaaaaaaaaaaaaaaaaaaaaaagaagaacaaaaa

SEQ ID NO: 8236 - DNA, 390 bp, Triticum aestivum
  Clone ID: LIB104-042-Q1-E1-H4
cggggccaacggggcaatgcaaaaccataatggcacctcccaaggggcaataacaaaaaggttcaacctggcataacctaagcaacatgcagcctgcccaacaaatggctacggacaatttgggtggccacaaccttcatacggctgccatgctctccgcagctggacggggtggacctgaactcgtccctaattcattgctgccttttgaggtttccgtcgtgcttcggggcccataatggatacccactatatatcgcaagaagttttcagttgacatgcgttgcttcgccggggataaggtttggctaaagcccgcaacccctcctaatggtgggccttcagttggcgggtcattaccatgtccacaatttagacctttcataatgg

SEQ ID NO: 8237 - DNA, 410 bp, Triticum aestivum
  Clone ID: LIB104-042-Q1-E1-H6
gtcagggaagagcgatggtcttttcctaccaatctatcccccaggagcatgcacgtaatactttgctttgataaacttctagatttttgcagtaagtatatgagttctttatgactaatgttgagtccatggattatacgcactctcacccttccacctttgctagcctctctaataccgcgcacctttcgctggtatcatacacctaccatataccttcctcaaacagccaccatacctacctattatggcatttccatagccattccaagatatattgccatgcaactttccaccatctagttcatcatgacacactccatcattgtcatattgcatatcccggtacaccgccggatgcattcacatagagtcatattttgttctaagtatcgagttgtaaatgttga

SEQ ID NO: 8238 - DNA, 412 bp, Triticum aestivum
  Clone ID: LIB104-043-Q1-E1-A10
atgacaaaaaaaaagttccggaagaaatatggttactgcgaaaaggcagacgtgaagtggaagccatatgctcctgatttcaagcacaagaatctggctaagctcaccatctacggcttccaacccaacgacaattttaagcgatacatcaggtgtgttgtggaacatgcggttaatataacagagatatctctgtacgacaggaagctgtgtgggcgctgtggtgacaaggtttatcaatcaagatatccacggactgccgaggagaggaaacgaacggctgaagggttgggtttgacttcacctgctgtgattcacttccggtcctaactgaaaaatgatttgcatgatattcttatatgtagtttggaaatcaactcctatcatctttagtcggaaggagttcctgaac

SEQ ID NO: 8239 - DNA, 404 bp, Triticum aestivum
  unsure at all n locations
  Clone ID: LIB104-043-Q1-E1-A11
cgcaaggaccttatggtttggtctaaccccaaatggcataaacccttttggggagcaaaacagcaaccatagcacctggccggtgactctaggttttgtataaccttcctccttggttgtgcatgaancggaagttcattatgatgccagtgctcatccaaggccctaagcaacccggcaacgacattgatgttttacctaaggccattagttgaagaactcttacaactgtggaatggaataagtgtacgtgcgtgggatgagcacatgggggaagaatttgacctaaaggcgtttttgttcatgaccatcaatgattggcctgctctcagtaacctttcangatagacaaataagggaatacgcggatgcacgcactgtttggatgataccgacagtatata

SEQ ID NO: 8240 - DNA, 393 bp, Triticum aestivum
  Clone ID: LIB104-043-Q1-E1-A12
gacgagggaatgtaagcacagggttctgttctcttccatgtttttctgctgttgtgccccatttgatccgtgtgtgaaaagagaatgactatggttttttgtgtgcacgcgcgggtggcacttgaatggtgtgcacgtgtacatgtgtgtatgctaacaccgatttggtgtgtgctgatgatcatgtaaattattatgggttgattgctcgtggatgtaaggtctatgtacagttgttacatgagtgctgtacagcctccgcatgcatgcgtgctgcttggcattgcacgtttataatctcgggttgttacttgtaagccagcatcagttgtaaagtacgtgtgtcaaaataagaaaactctttcctttttttttggttcaagaaaactcttt

SEQ ID NO: 8241 - DNA, 142 bp, Triticum aestivum
  Clone ID: LIB104-043-Q1-E1-A2
caaggcctagttaaacttcaaggcaaaggcgttcacctccaaaattgtaacctaaatccaatgcatggacttccggttgacagcctgggaacgggtaaacccttgtcggttggaaatttaaccgcgtagcgtcaaatttacc

SEQ ID NO: 8242 - DNA, 318 bp, Triticum aestivum
  Clone ID: LIB104-043-Q1-E1-A3
gactggggaacggatcggcagctcctaccgccagggtcctggagaagtacaaggatgaggcgctcgagccagacattaagacactatacatgaggctggaagtgctggaggctgaccgggaatcgatgcgccaggctctgctgggaatgcgcactgagaaagctcagcttatgcttcttcgggagatagcacaacagctagccaaagacgccgctccagttggcactggggctgggtctgttccagttgtccaccatttgcccagaaagcaagctgtgggggtcgcagatacaacggtcagggaagacaagaagacag

SEQ ID NO: 8243 - DNA, 401 bp, Triticum aestivum
  Clone ID: LIB104-043-Q1-E1-A5
cgggggaacacatgataacctgtgtgcttgttttgctagcgtcggtcgatcgatctcttgtgtcaccgctgatgattgttttgggtggcatgattatattaagttaactagtgagtagtagcttccaacttgtatggattgttgaatggttcatggctggatgggcatagcatgcagctaagcctctgaatcgatcctgctgtgatcctgaacaagggttgactacatataaatagcagcacatatagtttatcgacaaaaaaaaaaaaaaaaaaaaaaaaaaaaaaaaaaaaaaaaaaaaaaaaaaaaaaaaaaaaaaaaaaaaaaaaaaaaaaaaaaaaaaaaaaaggaaggaaaaaaaaaaaaaaaaaaaaaaaaaaaaaaagggggccccccaaaag

SEQ ID NO: 8244 - DNA, 428 bp, Triticum aestivum
  Clone ID: LIB104-043-Q1-E1-A7
gggaacgagggcctctctctccatcccgacctctcgtggccgccgcgaagaaaaggagcttatcatggcttcaaaacgtatcctgaaggaactcaaggacttgcagaaagatcctccgacatcatgcagtgcaggtccttctggcgaggatatgttccattggcaggcaaccattatgggtcctcctgatagtccctatgctggaggtgttttcttagtgaatatccatttccccccggactaccccttcaagcctccgaaggtatcgttcaagacaaaggtcttccatccgaacatcaatagcaatggaagcatatgcctcgacattctgaaggagcaatggagtcctgctttgacaatctctaaggttctgctttcaatctgctcactgcttaccgaccctaacccggacgaacctctcgtccctg

SEQ ID NO: 8245 - DNA, 383 bp, Triticum aestivum
  Clone ID: LIB104-043-Q1-E1-B1
aatgcgaaatgagctcgtcgtcgccttcctgccatagctacatccacagatctgcaggttccacgcatcttcgttattcgctacgatcggctacaccgccgtagtgtttcatatgcatcatgtcgcaggcagtcaaatggattattgaaatgattcgggtgactaaagcttcctagattgtgaatgactttctacattggggcaaacagagggtccgcgttgatttttttgcacttgttgaacaacttagggggcaacaccattccagcaagcccgaggcgccactggcatggatatgggtggtcgttataacatatggagaatatgcacatggaagtactactattgggccaatttatgccaggtgtacatcaagatgtttc

SEQ ID NO: 8246 - DNA, 275 bp, Triticum aestivum
  Clone ID: LIB104-043-Q1-E1-B11
tgcggccaaggcagccatggagttcctcgactccctctgcatcgctggcgcgtccagaaatgggatccagctgctcaaaccgaaatccaagaagaaacatgtgcaggtcaagctcctgtagaggccgccgtcgtccaatggccgggcgatcgagggggcagaggatgctgttggtggtgatgtcactcccaagccgcatcgtcggcgcacggagagcgactagggggtcgctcgcaagctgcaccgcgtgatgaataactcgccccggatttcct

SEQ ID NO: 8247 - DNA, 378 bp, Triticum aestivum
  unsure at all n locations
  Clone ID: LIB104-043-Q1-E1-B2
cggtcgactatccgggtcgacggggaagcggacgttcgatgctgagacgccgcggcggcnggagtctgcacgcagcaacaaggcgtccagaagccccgatcagccgcctgagctgccgcatgtgaacaaggtgaaggcgctcgtcggcgccttcgagaccgtcatggacgacaaccaaagccccgccaccgcccgcaagccgcggctcaacctccacgcctgaactacgagtacattccaccagcatgaagctcgatcgcgtgcgcctcctcctttatcccggctactctttaatcacccatcaacccaatttgtcgtcgtcgcacacttatctataattacggtatcgcttacattttgcaaagaagaagatgatgg

SEQ ID NO: 8248 - DNA, 421 bp, Triticum aestivum
  Clone ID: LIB104-043-Q1-E1-B3
gacgggaatgtacacaaaatcggatcctcaattttcactgtggctaaaaaacatatggcttccataaataaaaatttaaggcgccaccacttgaggttcaaaggttcaaaaggtagggaacaataagaacgggccaagaagcaccatttttccttccaaatcacaggtgtccttaatttggccaagtttattgcacacatcttagtgattagcatgaggaatacaaccatagtgattagcatggatagaaatttgatatgggtcagagggatttcgaatggcacatttgtgaggacgacaatcctgcactaataaccagtcctgacagtgtactgtttccaagtgcttggagcaagtgcaagtcagctgcataaatcaaaactcatagagtcaacttcttgtatgcagcaccgacacatga

SEQ ID NO: 8249 - DNA, 384 bp, Triticum aestivum
  unsure at all n locations
  Clone ID: LIB104-043-Q1-E1-B4
accggtcgaatatcncgggtcgaccggggagttgatgaatgatgacagaagactcttgcaatccatatgtagtatggccaatgaggaacagccaatggtgtaaggtatatgcatatgaataatcgctttcatctttatgtatataaaggcggtgtttacagcaccggcatagggaaagcttggcctttactagactcatacacctaatctgtcttctgcatgcctactgaaacatttgaatgctttcatgccaaattgcttaatcttaccaagatttgaatgatgtccttttcatcaataatactcaatctttgccttacagaggacacaagctcgtttaagctctctgagcctgtaccaacaacatacaagtttaaatttttg

SEQ ID NO: 8250 - DNA, 363 bp, Triticum aestivum
  Clone ID: LIB104-043-Q1-E1-B8
attcgcgcgtcgacgggataacgtaacgggattcccgggagatgaactacgatagcaagctccaaaacatgagctagttctgctacaaacatgtgaacacgttgtcccagacaaacatgaccacaaagtactcttatcataaaacactaccgacttcacgagggggaaacatcaacgagggtaacgaactcttgtgcattaccatggattaacacttaactccttttgtcgaacaaatcagtcagtggcaagtctccaaaccacagaatactttcgcacgtatgcatgactgatttgggatgattccacacaaagcaacattgactttctcgaatccacggcgggatcttgcatcagttgcac

SEQ ID NO: 8251 - DNA, 439 bp, Triticum aestivum
  Clone ID: LIB104-043-Q1-E1-B9
gggccaggcaagaaaggattctatcaatgtatcaccatttcaatcactacatgacaccacacaacagatatgctgctgtcagcagtcctctctaaatagacactgcaattatcgtataagtacatcattgctgctgtcagcagtgctctctaaatagacactgcaattatcatgtacatcattgctgctgcaatgaaccattaagaattatttaaaatctagcctaccatctgcgttgtcgtcaacagagggttgaggcggagttacaaaatctgtatgagaaaccgagggattgtccgagtcagcgacatctttgttatcttcagagctgtcagaagcagctgagatggcgtcacctgattctgaatgtgttctgtccacatatgcttcaggtaaggagctctcggccacgtcagcatcgccgttatgccgagcaatc

SEQ ID NO: 8252 - DNA, 390 bp, Triticum aestivum
  Clone ID: LIB104-043-Q1-E1-C1
cgggtcgaccgggggcataacttatgtagaaagaattaaactctcttgcttcacttatatctatttagagagatgacaggaactggtcattcacatggatagtcataaaatcctagataaaacttgtagatcactgaatatgatatgtttcattccttgcaatagatttgcgatataaagatggcgatattacagtcatgctagcgggtagttgtggattactagaaatacttgtgttgatgtttgtgattcccataacatgcacgtatggtgaatcgttatgtaacgaagtcggagcatgagttaattattgattgtcttccttatgagtggcggtctgggacgagcgatggtcttttcctaccaatctatccccctaggggcatgcgt

SEQ ID NO: 8253 - DNA, 436 bp, Triticum aestivum
  Clone ID: LIB104-043-Q1-E1-C10
ttcgcggaaagtatagatcatcctgatccggtccctctggcggtgctcccgcgagctgatgtcgcccctactgctcaggtggactcaaatggctgcttaggttgcgggcaaaactgttgggtgcgcagtcgcgggggagccgcaggcaatcaatggcgacaaggtctgctcaatcaacggacagggtgaacccgaggctccggcttaggcaaaaagttcagaagttactaaactacaagactattcagcgctggcacaagaggtggtgaggaatagcgactacgacgagcaaagacgcggtgcagccggcaacaacgactgtcgcctgctctctggtaaggcctccatcttttatctctttttgtgtcactttgaactatacacaagtgcaaactagttcggctcaagaaaagtataaacaagacacaaccctctt

SEQ ID NO: 8254 - DNA, 337 bp, Triticum aestivum
  Clone ID: LIB104-043-Q1-E1-C11
ggtgaatcatctaataaggaaactgcagatcttaaatctataagtattcatcccaatatttttgctatcattaaggaactgattgctacaaatgaatttgtcaatattgtgcctaaaagttttataatccctagaaagaaagaaattcctaagggaaatagatgcatcatcgaagaattgcctaccaaagatggtaatacctagatctatcctcgtttttatgcctagctgggggtgttaaacgatagcgcttgttgggaggcaacccaatttaattttaatcccttgcttttttccccggctaagtattaaataaattatttacccccggttttgg

SEQ ID NO: 8255 - DNA, 356 bp, Triticum aestivum
  Clone ID: LIB104-043-Q1-E1-C2
gacacaaaacaaccgcccgggcgatgatggacgagtactacgtcggcgagatcgacgcgaccacgatacccaccaaggtcaagtacacgccgcccaagcagccgcactacaaccaggacaagacccccgagttcgtcatcaagatcctccagttcttggtccccctcgcgatactgggcctggccgtcgccgtacggatctacaccaaggcagactctgtctagcaccgtcatcttataccagtcagtcagtcattcggaagtgtccaagagctgaataagttttagtggggatttgcatattttgtaccagcgtcaccgtcctgtcatggaatctgggaactgctctcgacccgt

SEQ ID NO: 8256 - DNA, 317 bp, Triticum aestivum
  unsure at all n locations
  Clone ID: LIB104-043-Q1-E1-C3
acccccaagggcctgattgtaatcttgtttccttttctgnggtgtttttctgcttatgttctggacacctgtgtgttctgggtccttcgtctgggtgctactacatgtgttgtactcctgtttgctatatgaatggcatgtggtgcttcaaaaaaaaaaaaaaaaaaaaaaaataaaaaaaaaaatataaaaaaaaaaaaaaaaaaaaaaaaaaaaatcaaaataaaagattaaaaaatttaattcacaaaaataaaaaataaaaaaatattttaaaaaataaaaaaaaataaaaaaaaaagggcctccccaaaaat

SEQ ID NO: 8257 - DNA, 452 bp, Triticum aestivum
  Clone ID: LIB104-043-Q1-E1-C4
cgggtcgacgggaaaccggactaccaatcctaaaaccccccggcggcggaattcggcacccaccaccaagccgtccaagaagccccgattaaacctccggaacctccggaaggtaaacaaggtaaaggcccccgtcggccccttcaaaaccgtcaggaacaacaaccaaagccccgcaaccgcccgcatgccgcggctcaacctccacgcctgaactacgagtacattccaccagcatgaagctcgatcgcgtgcgcctcctcctttatcccggctactctttaatcacccatcaacccaatttgtcgtcgtcgcacacttatctataattacggtatcgcttatattttgcaaggaggaagatgatcgaagggttatcatgatgtaataataataatgatcatggagggaaaaaacccacccgttggaaaaaaaaaaagcggccgccccaa

SEQ ID NO: 8258 - DNA, 392 bp, Triticum aestivum
  Clone ID: LIB104-043-Q1-E1-C5
gacgggggcacatagaacatctcacaccatgcccatcgcaatgccttccatgccggctccggcactagccctggcactgctcggtgctttcggcctcgccatcgccccggctgttcagtcggcccccaccatcgaggccatccaagctacatgcgccaagacaatacagccagactcttgcaaacacgtcctgctcgccatcatggccgccggctcaccggaggtgaacagtgtccccctaatgtccctgcaagtcgcggcaaagctcgccaagatggccaacggcttcgccaatgccaggctcaccacggacccgcaccccgccaaatgcctcgcaaactgcatcgaagaccttcatagggtggccaaggcatttgaggggatcccagtgg

SEQ ID NO: 8259 - DNA, 381 bp, Triticum aestivum
  Clone ID: LIB104-043-Q1-E1-C6
attcgcgcgtcgacaggattaattagattcatacccatcaagtcgaacataattgaggctcatatacatgctacagtcccttctgaactcagaatactcggctgaagaaattcagtctagtggtatgctgtctatatctgatctgcaatctcagctcgacagtcttctgtaggccatacttttgatctgttttgttatggtgtgtcctctgagtctgagtgagaaatgcactcgattgttcatctatagtgatgttacttttaatcctgtcatcaaatttaaacacactttgatatgacatcaattatggtggatggctaatacactattgttgctaatgtgttagcatatcagattgattaaatcgcccttcccaacaat

SEQ ID NO: 8260 - DNA, 419 bp, Triticum aestivum
  Clone ID: LIB104-043-Q1-E1-C7
attccggtcgacgggcgaactgatgatggcccgacgcgtgcatgcgcgtggcgtgaagtgatggcacgaagcgttcgatggaggagttcatggatgaataaatagtactgtagctactactaaatgtatttcgcctgccctgctactactgtagtcatggttgtataataatggtgtcagtatctaaaaaaaaaaaaaaaaaaaaaaaaaaaaaaaaaaaaaaaaaaaaaaaaaaaaaaaaaaaaaaaaaaaaaaaaaaaaaaaaaaaaaaaaaaaaaaggaaaaaaaaaaaaaaaaaaaaaaaaaaaaaaaaaaaaaaaggggccccccaaaaggttcaaatttaatttccccttaaagggaatttaaaaccccttcaaaagggcccccaaatttaatttcacgggcggtctttttaa

SEQ ID NO: 8261 - DNA, 380 bp, Triticum aestivum
  Clone ID: LIB104-043-Q1-E1-C8
attcgcgggtcgacgggttccaaaaatatatttaaaaaatatttaacaagtaaaaataacatcatattcagattgtacacatttttctaatcaaatttcatatataacatgttaaaattggagttacagtttaaaagatacagataatttagaaaagcatttgttttatttaaatatcttccaaaataatatttaaaaatatttaacaggtaaaaataacaaaaaatacatggagagttgttaaaaaggttgttaaaaagatacatgattttctaatcataaaaatatttttttgtctggaaaagatcatttttgtatggtcttctgtggacgcaggtacttgcgcccctatttcatcactatttcttgctatacatgtc

SEQ ID NO: 8262 - DNA, 420 bp, Triticum aestivum
  Clone ID: LIB104-043-Q1-E1-D1
ttcggtctacatgtgagtctgccgcggtacaagggaggccggctgcccgccggtgacatcattctagccagcggttagtcaaccgtggctcctaccatgcgtgggtggcacgaggtcctccatcggtgatggcgatcggcgagaagacgagtcagagacagaggacatcagaacatgctgattaaggaagatatcggtgttgacattttatgccacgtcagctccaacgactgggccatccttgtcataatcacgatcgattttaaagcactcggtcatttgggggttttgaacagccgtctctaaagttggtagttatcagcaccagaataaacttagtagttttttgaaaccctaccccgaactgtagtaattttatgtcatttactcgagttcaccggaataatacgttgggtttcc

SEQ ID NO: 8263 - DNA, 409 bp, Triticum aestivum
  Clone ID: LIB104-043-Q1-E1-D10
accacaagaaccaacgtcagcgtcgccctgcaagcacaacagaggattggaactctgaatcggacgacaactgaagcaaaacaatcgaccatcgacagtaaacctctgaagaaatgttgaaatgctgctgctgcttggttgattacagagagctcagtaggcaattaaggcctcacatctgacattagcatccgtaacatttgctagcactactcctagcagtacacaagatcacaagaatctccatttgctagcactactcctagcagtacacaagatcacaagaatctccatttgctagcactactcctagcactactcctagcatctgacattaagttttgacggagaagagacaggaagaggaagagagagcaatacctcaaggagtcatcacccatggacgcat

SEQ ID NO: 8264 - DNA, 389 bp, Triticum aestivum
  Clone ID: LIB104-043-Q1-E1-D11
agccaaagatatctgtaccgaacggtgtcaatggagagaaacagcaggatgccgtcaatgggaagccaaagtcgcctgtggcgaatggtgttaacggggatgcgaaggttccggcagagaaagccgctgccaccgctgctcctccggccgttacctacgcggcgaaggtggcccaaacagcagcggccgagaagaagcctgtggcgaccgagaagaagcctgttgtcgccaacggtgctgtcaagaccggagtagctgcttgatcgcattacccgatcctcccagctagccatgaagaacaaacggacggtgctggcgaaccaggcgagacatgcgggttccaaggtactgatcatcaaaggtggcgtctggaaagcgggtccgataat

SEQ ID NO: 8265 - DNA, 392 bp, Triticum aestivum
  Clone ID: LIB104-043-Q1-E1-D12
ggggccagcctgaacacttgagttcatgctcatggaaacaatgtagaatttttcatgaagattctcacaaaaaaataattatccccttgtaccattccattgtattataaaaataatgtgccatgatttgcctttaggatgagtagattgcttgttggtttgtgcggtgcaaaacataaactttggctgtagtgctcgattttacattttttactcaaatgtcaaatgattctgaaactttttgtaatgtctttatatataattttttttcttttttcctaattttttcagaatttttagagttacagaagtatggtggatgttcaaatctttacagactgtgtcctgttttcacatattgttgttatagcttcattatttgcgtatgtttg

SEQ ID NO: 8266 - DNA, 333 bp, Triticum aestivum
  unsure at all n locations
  Clone ID: LIB104-043-Q1-E1-D2
ggagctaagggattcttcaggggatgggtgcctaccttgcttggttacagtgctaagggggcttgcaagtttgggttctacgagttctttaagaagacctactcagatatggctgggcctgagaatgctgcgaagtacaagaccctgatttaccttgcanggtcagcttctgctgaggtaattgctgatatcgctctgtgcccctttgaagctgtcaaggtccgtgtgcagacacagcctggatttgctcgtgggttgagtgatgggcttcccaagttcatcaaagctgagggtgctgctgggctctacaagggcattgttccgctctggggt

SEQ ID NO: 8267 - DNA, 395 bp, Triticum aestivum
  unsure at all n locations
  Clone ID: LIB104-043-Q1-E1-D3
gtggcanaaatagcgccggaggctgcattctggccataataccgcctgggggaagaaggggtaggaggattttgttgcaccagccattattaaattgaatgcgtgcgaaccactattttcctttaaagttcaagtaaaactaaaactcgatcaataacatgccacagcatccaggaagcacaatactatatcattcacgtgcggtccccgaccctccatcaagttgaaaactagactagtgaaaatgtcaattaggatgcctctttgcatacaaatgtgctcctagcttcaaaaaaaatgcactcctacatgtacccgcgaatgggtgtgagagaactagtgcgtgcatgcaccgcttcccttcgtgagagtacaatatactatgcccaaagaac

SEQ ID NO: 8268 - DNA, 428 bp, Triticum aestivum
  Clone ID: LIB104-043-Q1-E1-D4
ccggtcgacgggtgagcatcatagaaatattatgcctagctataaggctttaaagaaaagcgcttgttgggagacaacccaatatttttcctttctgttattcaataaataatttatctagcctctgttttggttgtgtttgttgtgtttaattagtgtttgtgccaagtagaaccgttgggaaaacttggggaaagtcttgttaatcttgctgtaaaaaacagaaactttagcgctcacgagaactgctgtaatttttattttgaaagtgctatttagttaattcttttttgaagatgattaatagataaattcctcacgtccagcaatttattttagaatttttggggttccagaagtttgcgttagctatagattactacagactgttctgtttttgacagattccgtttttcgtgtggtgtttg

SEQ ID NO: 8269 - DNA, 409 bp, Triticum aestivum
  Clone ID: LIB104-043-Q1-E1-D5
attcgcgggtcgacttgggtaggaagcttccttagacaggtcagtctgccgggggaggagggaggcgggctgcccgccggcgacatcactctagccaccggttggtcagccatggtggcgagcatgcgtgtcgagcacgaggtcctccatggctgagggcgaacggcgagaggaagaaagagagacagaggagaagaaaacatgctgagtaaggaagatatcggtgttgacattttatgccacgtcagctccaacgactgggccatccttgtcataatcacgatcgattttaaagcactcggtcatttgggggttttgaacagccgaccctaaagttggtagttatcagcaaaaaaataaaattagtagttttttgaaaccctagcccgaactgtagtagttttatgtt

SEQ ID NO: 8270 - DNA, 402 bp, Triticum aestivum
  Clone ID: LIB104-043-Q1-E1-D6
attcgggcgtcgacgggacagggcacgaatacctgcagcacgagaatttcatggaatgagcagtcagttagtcaaggcaatgccgagtcttatttttacaaaagtccaggaagacaattgtacttcgtcaacatgtgccatttgcttggaagactacagtgttggtgaaaagataagggtgctgccttgtcgtcacaagttccatgctgcttgcgtggacctgtggctcacatcatggaggacattctgccctgtatgcaagcgagatgcaaatgctggaatgtcaaatttccctccatcagagtctacccctttgctttcttctgctattcccttgccagctgaatcgacagctttgtcatcttttcgttcaatgggaacagcatctcctccaaggacaat

SEQ ID NO: 8271 - DNA, 390 bp, Triticum aestivum
  Clone ID: LIB104-043-Q1-E1-D8
attcgccggtcgacggggaacgtgatcaccatcttcgaggaggaaggcgggcggccggacgccatcatgatcctgacggtgaagcgcgacaacatctgcagcttcatctcggagaccaaccccgggcacgtgcggtcgtgggagaccaaggacagccagctgacgatggtggcggacgacctgaagccgcgggcggtgctgacgtgcccggagaagaagttgatccagcaggtggtgttcgccagctacgggaacccgctggggatctgcggcaactacacggtgggcaaatgccacacgcccaaggccaaggagattgtggagaaggcgtgcgtggggaagaggagctgcgtgctggccgtgtcgcacgaggtgtacggcggggaactc

SEQ ID NO: 8272 - DNA, 432 bp, Triticum aestivum
  unsure at all n locations
  Clone ID: LIB104-043-Q1-E1-D9
ccttgaagaagtattttgttttctttctctaacggagctcacgagatttctgttgagttttgtgttgtgaagttttcaagttttgggtgaatttttttgatggattatggaacaaggagtggcaagagcctaagcttggggatgcccatggcacccccaagataatccaaggacaccaaaaagtcaaagcgggatgccccggaaggcatcccctctttcgtccacttccatcggtaatttacttggagctatatttttattcaccacatgatatgcgttttgcttggagcgtgttgtantaattgcgtantttcctgttagtctaccacaatcatccttgctgttcacaccttttgggaaaaccatacatgaattgaaatttgtaaaatactctatgtgcttcacttatatcttttgagcttgatagttttg

SEQ ID NO: 8273 - DNA, 425 bp, Triticum aestivum
  Clone ID: LIB104-043-Q1-E1-E1
ggtcaaatattccgggtcgacgggttttgctacttcttagtaataaataaattatctagtctctgttttggttgtgttttttgtgtttaattagtgtttgtgccaagtagaaccgttgggaagacttggggaaagtcttgttgaacttgctgtaaaaaacagaaactttagcgctcacgagaactgatgttatttttatttgaagagtgctatttagctaattcttttttaagatgattattagataaattcctcgtgtccagaaatttattttagaatttttggggttccatatcttgtgctagctacagattactacagactgttccgtttttgacagattctgtttttcgtgtgttgtttgcttaatttgatgaatctatggttagtaaaatagtttataatccatagagaagctcgaatac

SEQ ID NO: 8274 - DNA, 399 bp, Triticum aestivum
  Clone ID: LIB104-043-Q1-E1-E10
cggagcagaaatgacgctctagatgcggtcatagcgcacagagcgcgtgcattgccatgccagctgcacggtcaccacgacacaaggcacagggatgtcacgagaggattgcaaaccttgtctggtgatgtttccttccagggtggagcatttatgagtctatggcttgatctgaggtgctatggtgaagttggaactaagttctgaagtttgctgtagcaaacttggctgcgcactagtgatcaacagggatacaattggagccaacgaggttgtctggggtgttaagattaggaaagactaaaatccgggggagtttgaggaaaaatggaccaaggattaatatagttgctttaaaacttcatatttggtccaagaccaagattatgatgatgcact

SEQ ID NO: 8275 - DNA, 150 bp, Triticum aestivum
  Clone ID: LIB104-043-Q1-E1-E12
ctggggtagtataagaacattgtcaccacagtagaattggtcatgaaatttttgctccaggtgaaaccatgtactaatcgaaacgggtggtaacgcaaaaaaacacgagaaaggcgtaccggtcaaagataaagtaaaataacgtacttt

SEQ ID NO: 8276 - DNA, 376 bp, Triticum aestivum
  Clone ID: LIB104-043-Q1-E1-E2
cgggtcgacgggggcgcagcaggacggtgcagacgtcagcgggctcatctccatgatcatacaggctgtgctgacagcccggcacaataggttcgagtgcgagcagctcgcgcatcgggtcctcatgattgcgcagctcctgccgaacgtgaaggagccagaggcggcgcagccacttgccgggctggacagtactcttcggagagcccacgagcttgtcgtgtcctgccaggagaggagtgcggcgtaccagtttttcatggctagcaggactgccgagaggttcagggaggtagagagcaagatcgactcctacctcatcctcttcccggtgatcagctatatcggcataacacgccgccttgaacgaatctac

SEQ ID NO: 8277 - DNA, 304 bp, Triticum aestivum
  Clone ID: LIB104-043-Q1-E1-E3
taaatttcaaggcaatttcaaccacaacaataacaataacttaacaatccatggccaaatggctttgcaggttcatagaatacctaacaggaggtttccagggcttgtccattttttgatgtcattgctacgctactatcgttgcacatcccggtacatcgccaaaggcattcacatatagtctcagatatcgagttgtaacattgagttgtaagtatataacagtgtgatgatcatcattagtacaacattgtcccaagtgaggttatcacaataaaagtggtcatagaagccctcccccccc

SEQ ID NO: 8278 - DNA, 336 bp, Triticum aestivum
  Clone ID: LIB104-043-Q1-E1-E4
gcaccccatgatggcaaaaatcaacaccgacggtgacggtttcaccaacttaaccaatttaacccccttcggaaacgcaaacccggggcccataaaggacttcccaaaggtcttcaaaacaagtcaatttcacccaacccttccgtccaaagagccgatgcatctacgtatggcttcgtatatcaatttcatgcaactacctactccggtcacgatccagcctcagcttcacctgaggccggccctaaatttgtatgatcaaatcttttgctactactagttactactgatgatcactgttgcatcatttatttatttattttatatatcatcaca

SEQ ID NO: 8279 - DNA, 390 bp, Triticum aestivum
  Clone ID: LIB104-043-Q1-E1-E6
gacctccgcggacaaggtgcagcgcatgatggcagagatcgacaccgacggtgacggcttcatcgacttcagcgagttcatctccttctgcaacaccaacccggggctcatgaaggacgtcgccaaggtcttctgaatcagttcatttcacctcagccgtccgttccaggagccgatccatctacgtacggcttcgtatatcaatttcatgcaactacctactccggtcccgatccagcctcagcttcacctgaggccggccctaaatttgtttgatcaattcttttgctactagtagtaactagtgatgatcactgttgcatcatttagttatttattttatatatcatcacaagtttcctgtgattcttttctttctatacctttttg

SEQ ID NO: 8280 - DNA, 404 bp, Triticum aestivum
  Clone ID: LIB104-043-Q1-E1-E7
attcggcgtcgacgggcctaatgaaaactaagggatattaatgcctccttttaatagagtaccataccaaagcattagcacttagtgaatacacgaactcctcaaactacggtcatcaccgggaagtgtcccgactattgtcactctggggttgctggatcataacacatagtaggtgactatagcttgcaagataggatcaagaactcacatatattcatgaaaacataataggttcagatctgaaatcatggcacttaggccttagtgataagcattaagcatagcgaagtcatagcaacatcaatcttagaacatagtggatactagggatcaaaccctaacaaaactaactcgattacatggtaaatctcatccagctcatcatcgtccagcaagcctac

SEQ ID NO: 8281 - DNA, 291 bp, Triticum aestivum
  Clone ID: LIB104-043-Q1-E1-E8
gtaccgaacaaaaattccgcgtcgacgggattaagaagtctccagtcacattattataaccttatggtaatacatttatcatcctgctgcagaccttggtcatatatgtaagtcacgcacatataattcacacaataaatcacatcataacaatggaattcatcggcaggccgtatattcatgggatgattttcgtacatagatctaaacaagaatggcatgtctaccttagggaaacttctatatacactcactcattgtttacacatacgtcaggtccaagactccaat

SEQ ID NO: 8282 - DNA, 429 bp, Triticum aestivum
  Clone ID: LIB104-043-Q1-E1-E9
gaagaggctacggatgggcagcggtgaggcggtggacggaggagggtggggtttcgcggctggagcagagaggttatggcggcttgggatttcgaatggcgaaaaggaggcgatgggagcgggtgaagcatgacttaaggacacgcttatccaaaatgtagggtgtgttacaaaagtaccccccaccgatttgaactagcagccctttcggctcagggttagaagggggatttcgcgtgtcgggatttggcagctggagggagttttcgcgcgcgttgtaatttcgggagcaaggcgcgggttgtgaaggcgctagttttgggagcacgatatctaaattttcgggatataacaagacgcgggttgaattttaggtacaagcctaacatgtagtaatattgtacttgtacgtaccaaatcaattcgcac

SEQ ID NO: 8283 - DNA, 364 bp, Triticum aestivum
  Clone ID: LIB104-043-Q1-E1-F1
ggccatcgacgcattcgtctccggcgccaccgtctatggctacagaggaaagagcattaagtctgccctcattggtggttctagcctggcattcacatctgccatcctggacgttggtggtaatactaccagagtggacaatggcaaagcgtaccatgcatacacaacggaaaagaagcccgagcctgcgcattgaccaaggttgtttacttgtagcacaaatcatgcaaaccagctcggtgaatttttgagctgatgcgtgctgttatgtctgttttgctgatgcacctagttcctttgcaaagctgtagtaacttgttttgctcgagggcaatacaacagacctggaataaatatcttgttt

SEQ ID NO: 8284 - DNA, 314 bp, Triticum aestivum
  Clone ID: LIB104-043-Q1-E1-F10
gatcatgctattgacacggatgccacggtgctggagctctcaagggcctgcagtttcatcatgctcctcgcctaagtcgcctacctcttcttccagctcaagacgcagcaccagctcttcgggccgcatgatattgagggcggctatgatgatgaagacgaggcggtcctcggctttgggatcacgctcttctggctcatcatcatgaccatcataatcgccgtgctctccgagtacgttgtcggctacatcgagccgacctctcagtcatggggtctctcggtgagcttcatcaccatcatcctgttccccat

SEQ ID NO: 8285 - DNA, 406 bp, Triticum aestivum
  Clone ID: LIB104-043-Q1-E1-F11
tgaacggcatgtacaaggggttcggccccgccatggcacacaatgtcccggcaaacgccgccaccttcgtggactatgagatcacgcgatcggacctgggctgatccgcacaggtcacagcgcagactcagtctcttctccgatgccgcattacacagagcatctgagacacaattgaggaccatggtaaacaattcctctttactgcgaccttgtttccgaaaaccatgcatatactggcaccaatggcaggattgttgatgaaataaacgatgagcattacctgtcgagcagcgtcgcgggaacaaccgccgccgccatggttacgatcactgatctcggcatcttgatatgagtttagctgacgctaaataacttcaatcgcggcagctttgcttcgatgaat

SEQ ID NO: 8286 - DNA, 433 bp, Triticum aestivum
  Clone ID: LIB104-043-Q1-E1-F12
agtggcggacggagacgggcgatggtcttttcctaccaatctatccccctaggagcatgcgcgtagtactttgtttcgataactaatagttttttgcaataagtatgtgagttctttatggctaatgttgattccatggattatacgcactctcaccttccaccattgctagcctctctaacaccgcgcacctttcgccggtatcaatcacccaccatataccttcctcaaaacagccaccatacctacctattatggcatttccatagccattccgagatatattgccatgcaacttaccaccattccgtttattatgacacgctccatcattgtcatattgctttgcatgatcatgtagttgacttcatatttgtggcaaacccaccttcataattctttcatacatgtcactcttgattcattgcacatc

SEQ ID NO: 8287 - DNA, 394 bp, Triticum aestivum
  Clone ID: LIB104-043-Q1-E1-F2
accatcttgaaaatttgcgagtttacaaaagtgaaattttggcaattgcaccaaagcttgagatccctattgtctttttgatttctcccaattacactatagcggtgaattttgcgcttattacggactatattgatgggttgcattctactattgcacatgatgattttgatagatataatatgcatgtgcatgctgctcctacttgcaattattatgacagagtaactacatctccgcctctctatgtttccaatacgataaaattgcacgaaactgtttatactatgcattggcctttactttgtgtgcatgaattgttcatttatgacatgccgatgcatatgaagagagttataccttcgtaatgacatgagatacaatactttgtgct

SEQ ID NO: 8288 - DNA, 347 bp, Triticum aestivum
  Clone ID: LIB104-043-Q1-E1-F3
ggtcccttcatgggaaggcaagcacaaacgggcctaactgaaccccggaggaaaggcgcctcccctccgggttttacgccaacaacgtggatacatcgacgccaccaaccggcgcggcgacctcacctacgagctcggcgagaatgagttcgccgacctcacccaggaggagttcctagccaggtacgcgtcgtcctacgatggggtcggtgatgatactggcatcacgttgcctgtgggcggtggcgacgccgagctgtggtcgtccggcggcgacaatgatagctccttggaggctccgcctcccagctgggactggagatccaagggcgccgtcacaccggtca

SEQ ID NO: 8289 - DNA, 381 bp, Triticum aestivum
  Clone ID: LIB104-043-Q1-E1-F4
ccggtcgaccgggatctgtacggacgcttaacgcgccgaatacgagtgcgcatcctgttagtacatttttttatcagatcgtattactagtgtgttgtacccatctccatgttagcatcccaagcccatctggtgggtccttccatccagcccggcccactctgacgacgcaggtctctaacacagacgacttcttgccattcaccaacacatacatgtcactataatggatgaatgtgcaaatctagcaagagggcatatatcactttagttcgatgatctgccatttctaaaacaactagtttcaatgagtgaaattagaccatgtgggcaggttggtaagctaccgacacgtgaatgcaaacgatgagtgaaatcaga

SEQ ID NO: 8290 - DNA, 276 bp, Triticum aestivum
  Clone ID: LIB104-043-Q1-E1-F5
gtcgacggggtgaagtagttgtagaaggggtacggccttgtcatggcactcgatgtccctaggagcatcaccatattcgttggcttcgacatcatacagttttttgtaataagtttgtgtgtgggtggatggctaatgttgtctcgtatggattatcggcattctcaccttcaatgtattgcaagactctcgacaatggcacacgtttcttcgttactgctcacttgtttccgacgtccttgaatatactgacaacagttacctaatagtggattt

SEQ ID NO: 8291 - DNA, 414 bp, Triticum aestivum
  Clone ID: LIB104-043-Q1-E1-F6
attcgcgggtcgacgggtgattgcactgtacattagggactgactcctgtctgcaaatgttcagtggtggtacatatggtaaatgtgaagttatgaaagacaccactgttggcataaaatcctatgcaggtattgctgcggagggtatcggaaacggagcgctcttgatggcaatgaattaccatgtcaatacatccaatagcgctttgtgggattacatgccaatggttttccacatctgaccttctccgaaatttttgcaccgtacttccgccatgttaggccgcgtttcatcttttgcttgttatgatagtatttcaaccctttttgtgggaaaagctgatattggttagatgttgggtatagaagagccatagagggaacctaacaacgacattttcggcagcacggtcc

SEQ ID NO: 8292 - DNA, 396 bp, Triticum aestivum
  unsure at all n locations
  Clone ID: LIB104-043-Q1-E1-F7
attccggtcgacggggtgaagaaggagaacgacaacatgcagatcgagctcaggcatatgaaaggcgaggatgtgaactccctgcagcccaaggaactgatcgccattgaggaagctctcacgaacggccagaccaacctcagggacaagatgatggaccactggaagatgcacaggaggaatgagaagatgctggaggaggagcacaagctgctggctctgaggatgcaccagcaggacgacctgagcagcggcatgagggagatggagctcgggtaccatcagggtagggatttcacttcccagatgccgttcaccttccggctgcagcccagccaccccaacttgcangaagacaagtaggccaccgaatccctgcacggnctgtgtcaactg

SEQ ID NO: 8293 - DNA, 376 bp, Triticum aestivum
  Clone ID: LIB104-043-Q1-E1-G1
cgggtcgaccggatctacaagtgaagcggaatacatggcagcctcggaggcagcacatgaagcaatttgggtgaaggagttcatcaccgacctaggagtcatacccaatgtgtcggggccgatcaaacacttctgtgaaaacactggagctattgcccctgccaaggagcccaggtttcacaagaagaccaggcacatcaagcgtcgtttcaactccatccgtgaaaaagttcaagatggagacatagatatttgcaaagtacatacggatctgaatgtcgcagatccgttgactaaacctctctcgcgagcaaaacatgatcaacaccagaactctatgggtgttcgatacatcacaatgtaactagattattga

SEQ ID NO: 8294 - DNA, 398 bp, Triticum aestivum
  Clone ID: LIB104-043-Q1-E1-G10
ggggccacgggctgattcaaattttgaactgggggcataaaggtccatttgcccattttcacctggtcggaacatattccccagcgacttacatttcggaacggagggagtagtgactatctatttcatatctttattagtcatatgtatccccgatcgtttgctccatcagggataaccataaaataaagcagatgcatgttggttattgaagagacccagaggagcaacttctgaatcttaaatatgccaaaagcacattcaacatttaaataattgtgtttaccttttgattaccacagggtgggtacagactggtccttctgacccgtgatgataactcaaggttgggcagcggcggctgtggtagcaaacggtggtggcggcagaaggggaga

SEQ ID NO: 8295 - DNA, 401 bp, Triticum aestivum
  Clone ID: LIB104-043-Q1-E1-G11
gggggatgccacggaagcatcccatctttcttcaacaaatatcggtatgttttcgtttttgtttcgttcacgtgatatgtgtaaatcttggagcgtcgtgtgctttttattttttaataatgcaccatgctggtatgagatagtccatggttggatttatagaatgcttgtgcttcacttatatcatttgaagtttgggttgcctgtttctcttcacatacgaaaccgttatttgtagaatgctcttttgcttcacttatatttattagagcatggtcttttgtagaaagaattaaactctcatgcttcacttatatctatttagagagtcaacaagaattggtcatttgcatggttagtcataaaatgctacataaaacttgtggattactgaatatgat

SEQ ID NO: 8296 - DNA, 445 bp, Triticum aestivum
  Clone ID: LIB104-043-Q1-E1-G12
ggggccaggggctctaacagcatgtagggttattaccggatgatgtttcccggggcccgaagctgtctaaatccttgtgttgtgttgcgtctctcgattccgctcaacccctctcaagctactacatagatgcgctggcctcgcgactaagtcctgacactaaggacatctgccgtgacaattccacgacacggcccatgtatggcccatgacgtctttcggcccatatgaggcccttattactctcggcccattaacgacccgtggtaaaactggcccgtaatgaacagtgtaccactttatacccattaacggcccgtggtgaaactggcctgtaatgaacagtgtatcactttatacccattaacggcctattattccgttgggccgtttccagcccatgttatctttcggccttctcggggcccatttgttcttgggctca

SEQ ID NO: 8297 - DNA, 402 bp, Triticum aestivum
  unsure at all n locations
  Clone ID: LIB104-043-Q1-E1-G2
cgggtcgaccggcttgaggattctggtttgagcgacttgtcccgagtgaccagcgtggcatccttctttgtcagccgagttgacagtctgatcgacaaaatgcttgagaagattggaacaccggaggctcttgccctgaggggaaaggctgccgtagcacaagcaaagatagcaaaccagctttacctgaagaaattctctggcccgaggtgggaggctttggtgaagaagggagccaagaagcagaggttgttgtgggcatccaccagcgtgaagaacccggcttacttggacactctttacgtcgatcctctcatcggacctgacaccgtctctacgatgcccgaccaagctctggacgcgttcatcgaccacggcacagttgctangacaatcgacgct

SEQ ID NO: 8298 - DNA, 404 bp, Triticum aestivum
  Clone ID: LIB104-043-Q1-E1-G4
gagagtaaaataaagaagtgtaaaagaaagtggattcatcagatgatacatgagtccctaattccgaatcaagaaatttgttgtggaatttgtcaattgagtaaagtaataatattaagaactagatcatctaaccccattgaatgaaaaaatgaaattcgattttcaaggaaatttttgaataagagataaataaacaattgaattgaaaaaaaaaaacttctttctattttggataatttctttttcaataggaccctctttttggagtgaacgatcgaatattcccctattccttcttattttaactgattgtattccatatggaataagaggagaacaaaagcattccacgacctgccaaggggctgttaaaaaaaaaagaaagctcttccttgaattta

SEQ ID NO: 8299 - DNA, 383 bp, Triticum aestivum
  Clone ID: LIB104-043-Q1-E1-G7
attcgcgcgtcgacgggggaaaaaagaaaaaaaaaaaaaaaaaaaaaaaaaaaaaaaaaaaaaaaaaaaaaaaaaaaaaaaaaaaaaaaaaaaaaaaaaaaaaattaaaaaaaaaaaaaaaaaaaaaaaaaaaaaagggggccccccaaaaggttcaaacctaacttacccttaaatgcaacttcaaaccccttcaaaagtgcccccaaattccatttcaggggccttcttttaaaaacttcttaacgggaaaaccccggggttaaccaaattaaacccctttgaaaaaaatccccttttcccaagctggcttaataccaaaaaggccccaaccattcccctttccaaaaatttgcccaccctaattggcaatgggaaccccc

SEQ ID NO: 8300 - DNA, 422 bp, Triticum aestivum
  Clone ID: LIB104-043-Q1-E1-G8
agagggcgtgataactcttcggatacatttggacaaacaagacatcggacgtagggggaattcgttgaagcagttttcaagaccgatgacccaagacgaagaagagctcggaagatccgagggatgtctccaaacttgaagactggtttaggagctactgatggtgtctcagaattggggtcattcaccatgtcgtgtcccggccaggtgggccgggccgaggaccccatgtcggttcactagtggaccacatcaaggcggaccatggcttgaagaaggaatacttccgaagacttggcgcctactccaaatacttagatgtcgtctacaacacaattaccttatacatagccgaccttggtataaccctagccaaccctggtatctatataaaccagggggacagggctcgtacatgaaat

SEQ ID NO: 8301 - DNA, 435 bp, Triticum aestivum
  unsure at all n locations
  Clone ID: LIB104-043-Q1-E1-G9
ggggcccaggctgggtgattatgaatttaaagaatgcttgtgttgaagttagcaagctagctagcatgcacgtatggttaaagttgtgtaacaaatttgaaacatgaggtgttcttagattgtgcatccttatgagtggtggtcggggatgagcgatggtattttcctaccaacctatccctctaggagcatgcgcgtagttcttggtttttgatgacttgtagatttttgcaataagtatatgagttcttttgactaatgttgagtccatggattatacgcacttttacctttccatcattgctagcctcttcggtaccgtgcattgccctttctcaccttgagagttggtgcaaactttcccggtgcatccaaaccccgtgatatgaaacgctctatcacacatanacctccctatatcttcctcaaaacagc

SEQ ID NO: 8302 - DNA, 253 bp, Triticum aestivum
  Clone ID: LIB104-043-Q1-E1-H1
cttgcccggttttcccttggcccccttggttggtttcacttcctcttttcctttcctttttggtttatttttctcttcttgttgtgggggggtccccctgtgggttcctccttttcttctccgtcttttcgccttcttgtccctcttttgtggtctctctccttcttttcctggccctcctttttcttccttttcggcggggtccctcctgtttttcccctcttttctccttttttcgctttcccctcttttc

SEQ ID NO: 8303 - DNA, 421 bp, Triticum aestivum
  Clone ID: LIB104-043-Q1-E1-H10
ggcgggggaggattctgcagctctcaaacttcaaggatgactccagtccaattgcctgggactgttctgcgtgggttcgcacatatggtcagtttttggaggaaagactggaatgcttcaggatcctgaaatatgatgttgaggctgagcgtttatccaaacaaggccaaggtcctgaaaagggacacagtagaaccagagacctagattcccaggacctgttagagcagttgccagctttgcagcagttactgtatcggcttgttggatgtcggccagaaggagctgcaaataacaactacttggtgcaatatgctctagctttggtgctaaaagagagtttcaaaatttattgtgcgataaatgatggaattattaaccttgtcgataagttttttgagatggcaagacatgaagcact

SEQ ID NO: 8304 - DNA, 400 bp, Triticum aestivum
  Clone ID: LIB104-043-Q1-E1-H11
cggggcccagggaaaccaattacgatgacagaggatcatcgagtagtcagtacaacagaacgagcgaggatagcgaaattagggaatcgcctgaaagatggcgaaagccgtatatgtggactgaatctttgcaggatgcttggagacaagtttctcaaagagcaagatccaaggttcagtaaagaaccatatgtgagcccagtagttcagatctcgaaatcgtgctcagcttttgcgcttatcgctagcgatggcctatgggatgtcattaccgcgaaaaaggcagcacagcttgtcctcgattataaggagaggaacatgggccaagaaatctcagcggacggagtagcagaccatgtgcttagtgaagccaggaatctgcggacgaaggacaacacat

SEQ ID NO: 8305 - DNA, 330 bp, Triticum aestivum
  Clone ID: LIB104-043-Q1-E1-H12
ggctaataaggaggaccttcctttaagtgccgcggagaggaagctaatgcatgcatacaacgagaagcctgtgctttctagacctcagcatcagtttttcctgggtgataactactttgaggttgacattgacatgcatagatttggctacatctcaaggaaaggtttcgagacattcctggacaggctaaaaatatgcatgctagatgttgggctaaccatccagggaaacaaacccgaagaattgcctgagcaggtcttgcgctgtgttaggttgaacgggatagattatgcaaagtatcagccactgatgacaaacggtgcctgaac

SEQ ID NO: 8306 - DNA, 261 bp, Triticum aestivum
  Clone ID: LIB104-043-Q1-E1-H2
gcgcggcaaaaaaaaaaaaaaaaaaaaaaaaaaaaaaaaaaaaaaaaaaaaaaaaaaaaaaaaataaaaaaaaaaaaaaaaaaaaaaaaaaaaaaaaaaaaaaaagaggaaaaaaaaatttaaaaaaaaaaaaaaaaaaaaaaaaaaaaagggggccccccaaagggttcaaccttaatttccccttaaaggaaatttaaaacccctccaaaggggcccccaaatttaattccaggggcgtctttttaaaaacttctaaag

SEQ ID NO: 8307 - DNA, 339 bp, Triticum aestivum
  Clone ID: LIB104-043-Q1-E1-H3
cagggagaccctgctgggcaagccgggtaatccaagggccgcatgggttggttcaagttcaaatttaatttaacttttgggttaattttccaataattgtggtttatattcaaaaaaccaaaaggtaaaattcatgtgagctttagaaaaaattataaaaatataaaaagatgtcgccgtatgttaaaatagatctatatagttccattaaaaatatgtacgtaatatttgaaagaaatattcatgtgtcttcataaaaatgtcattgaggattttaaaaatgtttatgcaatgttaaaaaatgttgtgagcagtaatttttctgtttccagtaaaatt

SEQ ID NO: 8308 - DNA, 394 bp, Triticum aestivum
  Clone ID: LIB104-043-Q1-E1-H4
gctctggaaggccgggtacctagccaagaaagtagccaatcggcttccggccaagggacaaatcgtccccaccccgaagccccaggagagggtggtgttcgtctctcacttcgtccgcgggctgggattccccctcgacccgttcgtccgtggacttatgttctactacgagcgggacttacacgatctggcccccaaccccatcctcaacatctcggcatttattgtcgtgtgcgaggccttcctctgcataccacctcactttggactatggctgaagaccttcaatgtgaagccaaaggtggtgagcggtcagcaaccagagtgcagaggcgccatggtgggcaagatgcccaatgtcacctggcccgaaggatcctttgtggagactgtc

SEQ ID NO: 8309 - DNA, 430 bp, Triticum aestivum
  Clone ID: LIB104-043-Q1-E1-H6
cgggcccagctacggccgcaagaagaatgatgacgacgatgacgaggataggcagcggcgatacaagaagcgcgacgacgacgacgatgatgagaggaagccacggcacaagaagcacgacgatgatgacgacgacgatggcgagaggaagccgcggtacaagaaacgtgacgacgacgatgatgatgaggatgacaggaagccgcgttacaagaagcgtgacgacgacgacgacgatgatagaaagccacgttacaagaagcacgacgacgatgacgacgacgacgatgagaggaagcagcgtcgcgggaacaaccgccgccgccatggttacgatgactgatcaaggcatcctgacatgagtttagctgacgctaaataagtatagtcgcggcggctttgcttcgatgaatcaacaattccgtatttt

SEQ ID NO: 8310 - DNA, 416 bp, Triticum aestivum
  Clone ID: LIB104-043-Q1-E1-H7
attccgcgtcgacgggattgagaaccggtctgtgagaaaatgggcatctgcatccagcagctcaagcaacagcatttcattggacacttacagttcttttcatagctatggcaccaaagagactgacagctgggtgaggccacacctggagcatgatggctcaggtttgctgctgcaagcatacgatgatgacattgagaaaatctgctatgtgatgaatgagctagcaggtggtggtgtcgatggttctgctgatcgtatcatggatgagacgctttactcgaatggcatcgatgatttcatgattttgccagcaggcaagaatggggagaagaagaagcagctaaccatcgatcaagaattcgagcagtacttctcaaaactcatgctttagcgtgaccgtaacagagaattta

SEQ ID NO: 8311 - DNA, 432 bp, Triticum aestivum
  Clone ID: LIB104-043-Q1-E1-H9
gggcagcgcaggagcaattgtggccatcgtggtgttttcaagggagagcgaggcaactgcaatcacgcaactgaagaagtcgaaacccggggcgaagttggccaacatgaaagctgacaaacctaaatgccggtgataggttgttcgccgctgtcgtgccgtctttgaacttggtggagacgcagaagcagtggcggagctaggatcaagccatgacccgggcaagccccaggccaatcacttggtacagtgctaaacagtgtaaaatccactacagtaaacgaaggagccaagcctcaggacccaggccgccgcccgggcagcctggggcttgtctccgccactatgcagaaggagaacggtggcgccgtgaagaccttgacgactgttgccatgaccacaaccatgatgattgtgttggtaataaagata

SEQ ID NO: 8312 - DNA, 390 bp, Triticum aestivum
  Clone ID: LIB104-044-Q1-E1-A1
ccgggtccacggggtgctgttagagttcccgaccgggtacggcgccatggccgcgcagatgaaggcattctttgactccacaggctccctctgggagaagcagaggctcgccgggaagcccgctggattcttcgtcagcaccggcacccagggcggcggccaggaaaccactgcttggacggcaatcacccagctggtgcaccacgggatgctgtttattcccatcggctacacctttggctcgggcatgtttaacatggacgacatcagagggggcagcccctatggagctggagtttttgctggtgacggtagcaggcagcccagcgaggcggaacttgccctcgccgagcaccagggcaagtacatggccgccttcgtcaagaagct

SEQ ID NO: 8313 - DNA, 446 bp, Triticum aestivum
  Clone ID: LIB104-044-Q1-E1-A11
ccgggtcgacgggaacatccagatcatagcccacaccatcactaacatttagagcaacatgtatgagtatatatccttcaatatatagtaggcacatctactctatctagtatacaaacattcactttacaacgtatctattgttgaaaagcagctggaaatatatagatgcgtggagcaagttgtgcataatatcaccatcactaattgttgaaaagcaactggaaaattgtaatttaagaaacctcagagcattgattcaaatatcacccatcatagctcacaccatcactaacatttagagcaacatgtacgagtatctatcctctcaatatatagtaggcacatctactctatcatacattcactgtacgacgtgtctgttgctgaaaagcaaccggaatagatatagatgcatgaaacaagctgtggacattgtgtggcga

SEQ ID NO: 8314 - DNA, 439 bp, Triticum aestivum
  Clone ID: LIB104-044-Q1-E1-A4
gggtgcacggggtgcctgtattcttgtatcaggactggaggaggcacctgattgaggtgctggtgcagttgaagtagaagatgcatgcggtgtccatgatgaaggtcggtgatgaggacatgactaccttggatatgaccaaaaatattgcatatatgcatatttgtcaggtgatttctagtgcaaactattcaataatctatttatgttatccagaacaaaatacttcacacacttttgtgttttgtctaattgcaggtgtatgggacatttgtagaatccacatatgaagataaggaagaaagagatgtttatttgctgtccaaaaagttctctcacgtcacttttggcccaagagaagatagagtccaagtctctcacgttctggattcagattcggactgcacagacacacctgactcaaaacgcacacaagttt

SEQ ID NO: 8315 - DNA, 372 bp, Triticum aestivum
  unsure at all n locations
  Clone ID: LIB104-044-Q1-E1-A5
cgggtaccaacagtcacattcaagtaccggcagtttcggtaaccccagttcctctcttttgattgaacagaaataagatgacagctgggtacacataagtctttccaattggcagtaaggagctgagataaagatcaccacaacgtgatccaaagaccgcaggtggcaccgcacgcgcagcgggcgacggcaaccgccagctcaccgtcgccaggcggaagcgagctaggcttccgcagagccgcaatgatcttccggcagcatgagactgncaggatgggttgtggtgctggtggcttggcgagccaaatcatgcctcggatgcatgatgccaaccttggccgggaagaagacangacgacggcgccattg

SEQ ID NO: 8316 - DNA, 427 bp, Triticum aestivum
  Clone ID: LIB104-044-Q1-E1-A6
ttcccgggccgacgggggccaccaagaggggacctggctaccattactactgcagttcccgcgtggttggaagatgtccaaggcggttaccaagaagatgcagaagctcaacgcctactgaccaaactcaccagttcgccggagggttttgatgggtttgtgctccaggacggcatcatccgccacaggggacgagtgtggctgggagcaaatgtggctttgcaaagacaggtccttgaagcgttgcacacaggcgctatcggtgggcactctggtttcaatgccacgtaccggcgtgtgcgacatctcttcacgtggccgagcctgaaacatcacgtgaagttattcctcgaagcgtgccagacttgcaagcaagccaagccagaaaggattcgttacccgggattgatcgagcctcttcctgtac

SEQ ID NO: 8317 - DNA, 436 bp, Triticum aestivum
  Clone ID: LIB104-044-Q1-E1-A7
cggggatagatattgctctagtgcttcacttatatcttttagagcacaacggtggcttaattttgtagaaattgctagtctatcatgcttcacttatattattttgagagtctcttagaacagcatggtatttgctatggttataaaattagtcctagaatggtaggcatccaagttgggtataataaaaactatcataggaagtgaattggatgctatgatcaatttgatacttgataattgttttgagatatggaggtagtgatattaaagtcatgctagttgggtgattatgaatttaaagaatgcttgtgttgaagttagcaagtcccgtagcatgcacgtatggttaaagttgtgtaacaaatttgaaacatgaagtgtccttgggttgtgcatccttatgagtggcggtcggggacgagcgatggtcttt

SEQ ID NO: 8318 - DNA, 398 bp, Triticum aestivum
  Clone ID: LIB104-044-Q1-E1-A9
cccgggtcgacgggcgcatagagtacaacgagttcgtggcgatgatgcagaagccggcgctggggctggcgaagaaggccggggccgggctggagagcagcttcagcatcggcttcagggaggcgctgaggatggcttgaaggaggaggaggagctaggtggtagtcatggcgacgctaatttcgttctgctcgtcgaagacgcttgttgtagagacatggtgaggcgattgagttttcatagggtcgaagtggcagcagctcctggcgagtagcggagggtcgggactcgggacaacatgtgtgtagtagaggcaggcaggcaggcccggtgattttcttctcgctactggattggttcaattgtgtattatactgagtataaactacagaaagctt

SEQ ID NO: 8319 - DNA, 453 bp, Triticum aestivum
  Clone ID: LIB104-044-Q1-E1-B1
taccggtcagctccgggtgccggggagcacataattgacggcgagcacaaggagggcatgatggagaagatcaaggacaagatcagcggcgacggccacggcgacggcaagaaggacggcgaccacaaggagaagaaggacaagaagaagaagaaggacaagaagcacggcgagggccacaaggacgacgacggccacggcagcagcagcagcgacagcgacagcgactgagccagctccggccgcgctccggcagcagcgtgcagtgtaggcgagatcgatgaacgcttgggagaagtgtggcatacatatatgttgcagggtttggagcgtgtggtagcatatgtatgtaatgcgtgacatgtctcatggatcttgtgatgtataataattagccggctgcactgcactgcacggtgcttgtaataataacgttaatgaatcatgttggta

SEQ ID NO: 8320 - DNA, 441 bp, Triticum aestivum
  Clone ID: LIB104-044-Q1-E1-B11
atgcccgggtcgacgggtggcgccaaggctgaggccaggttcaagcagataactgaggcctacgaggtactaagtgatccagaaaagcgtgcaatttatgaccaatatggtgaagaaggtttaaagggtatgcctccacctggttcgcaaagccggaccgccacagcttctggctcaagtgggccaagtaatttccgttacaatcctagtgatccagatgatatctttaatgagttcatggcgagcaacaagccatacacctttgatcaagaccgaaggcgctttcaaccagcacaccggacctcagcagtgaatggtcgaagtgaagcttcttccagttctcagaaggagcctggtaccagtacaagccatctggaaaagccaccgcctgtggagaagacattactttgcactcttgaagagctgtataatggaacaaaa

SEQ ID NO: 8321 - DNA, 252 bp, Triticum aestivum
  Clone ID: LIB104-044-Q1-E1-B3
ggttccattctacctttcgagagcattgctcggtcaacttctttaaatggcacagacagatgatcaccccgtgttcgcctgaccatgcgctcaccttttcgacgcgcaattctgcgaccgaagctgccataatcatataatggatgtagttaaacaagggatatagggaaaccaatttggaagaaaggtgaatagatatagccagtaccggtaattttccccggcggtaaatcacccaaggaaccagaactc

SEQ ID NO: 8322 - DNA, 441 bp, Triticum aestivum
  Clone ID: LIB104-044-Q1-E1-B4
acggtcgtagcttccgggtgcacgggttgatacaaattactatagactattctgtttttgacagattctgtttttcgtgtgttgtttgcttattttgatgaatctatggctagtaatggagtttataaaccatagagaagttggaatacagtaggtttaacaccaatataaataaataatgagttcattacagtaccttaaagtggtgctttgttttctttcgctaacggagctcacgagattttctgttaagttttgtgttgtgaagttttcaagttttgggtaaagatttgatggattatggaacaaggagtggcaagagcctaagcttggggatgcccaaggcaccccaaggtaaaatccaaggataaccaaaagcctaagcttggggattccccggaaggcatcccctcttttgtcttcgtccatcggtaactttac

SEQ ID NO: 8323 - DNA, 391 bp, Triticum aestivum
  Clone ID: LIB104-044-Q1-E1-B5
gggagggaacatcggtgatctctgccgaggtgaagcctccagtaaagcagcaagtgagcccggcgccattcaaggctgccgtggagaacgtctacatgaccgacgcgatcacacgggcttccaagatcatggctcagtgcagcgcagccttgttgaagaggtgagaccctgcgctaggtacgtcgccttgaggaagttgagtcagcggcagacgagagttttagttgcttggcgagttcactcaccagttgtcgttgcttggttggttgggagcataagatttggagtgcctctaccctagcgagatgcggggagcagcgaaacgtgaaagcagtgcatgtttctggaacgtgtgagaagcggagcatacttagtaagcttgttttgtcct

SEQ ID NO: 8324 - DNA, 426 bp, Triticum aestivum
  Clone ID: LIB104-044-Q1-E1-B8
ttccgggtcgactctgacgacaaaaatacttgggtgttggactggatgaccgaaaacactcattataaggcaccggcctctgaattacttcacgccctgcccatcagtcctccacctgaaggagctcgttgcgtgtaccaagagcctgaattgactgcccattatatgcaagtaattatgaagcctctgaagcctggtcaagctccaaggaccaaattcctcgtgaggcaattgctctatgtgccaagaactgtctatcgcattctgacgaagacaatgagtccgatcaaaggccacgactcgtctgataaggaaattgttggcatcatgaagaatctgctattcagtgtcatacatgccattcctgtcaactagcatgatttcttcatgaggactctggaaaatgtcgcactctctccgtttgag

SEQ ID NO: 8325 - DNA, 422 bp, Triticum aestivum
  Clone ID: LIB104-044-Q1-E1-B9
cgggtcgacggggtagaagagctttgtcaactttgtcaatatgaacgattctagctctagtgaccgtacgatgtccatccaacggccgtagtgcttcttcaacctctggtcttcttgctctagccgcccaaagcagcgctggtcgtgccgcatgctcctgcctcccgtggccggctatgctgccgcagaggcctcaccgccccctactattcccaccgctggccaggccctacggcgacgacagcctcacaccgcagccgaaccagtgaaccctcgtactcctctccgcgcgggcttccactgcgcgtcttccccggctccgcgtcgtccccttcctaggcctcgccgtcgtccaccgccgggtgctctctgcgcggcatggtcaacgtggtcaaggaacgacttccatcggaagagtactg

SEQ ID NO: 8326 - DNA, 438 bp, Triticum aestivum
  Clone ID: LIB104-044-Q1-E1-C1
gggtgcacgggtagcctctaaggtaccgtgcattgccctttctcaccttgagagttagtgcaaacttcgccggtgcatccaaaccccgtgatacgatacgctctatcacacataaacctccttatatcttcctcaaaacagccaccatacctacctattatggcatttccatagccattccgagatatattgccatgcaacttccaccatcatcatcatgacatacattacttttgtcatattgccattgcatgatcatgtagttgacatcttatttgtggcaaagccaccttgcattatttttcatacatgtcactcttgattcattgcaccatcccagtacaccgccggaggcattcatatagagtcatatattgttctaagtttcaagttgtaatctttatgttgtaatcaatagaagtgtgatgatcatcatta

SEQ ID NO: 8327 - DNA, 433 bp, Triticum aestivum
  Clone ID: LIB104-044-Q1-E1-C11
gacgggagagatgattgttcatccaacaagagtgcaacaagtatcaagccgcatttgagagcgttgaagcacggcccgtgagtggtctcgacgttggggacacggtatgctctcctcttcctagccctttccttgctacggccatgagacttcggccttgtatatgtttgcatgttcacttgttgttgatcatgtggtgtaggcatttcaatctttggtggcattcaaggcccggcacatgacaagccattcactcttacgcattgttggacgctcatcgacaattgccctaagttcaaggaccaataccgtgaactacaaaggaagagatgactgaagacagccaagttcgccggaggtggagatggcgaggcgttgaagaggccgaggggcaagaccaactccaaggttgatgacatacgtgatgcctcat

SEQ ID NO: 8328 - DNA, 416 bp, Triticum aestivum
  Clone ID: LIB104-044-Q1-E1-C12
ccgggtcgacgggtgaacataatttgtaatgctggcttctgccccatgctcctggatgaaacatgtagattgcaagcattacatcttactagggggcttcataagcctctgctatctgttagtctgttgttgtgggtatagggttatgtaaaaaaactgcattttttttccggcaaataagcatatagtcaccgtcacaatttccaataggaaaaggccactacaccatctggcacctaatgacaaaacgaagttccaaagacaacaccaacaggtcttcacacaattgtgcctattggccacaacacaacaaatgttgagaagtttcaacctggtcatgaaatgagcacataggattaccagaccattttccttcctcatcacctccctagttaggggagtatcaccaaagaact

SEQ ID NO: 8329 - DNA, 389 bp, Triticum aestivum
  unsure at all n locations
  Clone ID: LIB104-044-Q1-E1-C3
ttccaccagngaaatatccatcatctcatcgaaagacgggacacctttgcctctatcaagtggtatcagatttccaggttgctcggtgagattttacagtttttcgtagtttagatcgagtctgttcttcatacctacagtccacgaaaaagccaaaaaaaaaaattacggttagttcatcatatccgaaccaatctgagcctttgcataatccttttagggttttgctttgttgaatttgcggttgcatcgtcgtgtctagttgctggtcttaaagtctagtcttttagagtttcgagttctggtcataagttgtcatgccgccgccgcaccatcatcatcgcccctgccatctaccaccaccgcttatccgccacggctccgaatcc

SEQ ID NO: 8330 - DNA, 426 bp, Triticum aestivum
  Clone ID: LIB104-044-Q1-E1-C7
ttccggccgacggggaggttgagaagctgattggcaggatagtgaagtggctgaagcccggtgggcatattttcatcagggaatcgtgcttccaccagtctggggattccaagaggaaagtgaacccgacgcactaccgggagccgaggttctacaccaaggtgtttaaggaatgccactcctatgaccaagaggggaattcctttgagctttctctggtaacttccaagtgcattggagcttatgtgaaaagcaagaagaaccagaaccagatatgttggctgtgggagaaggtcaagtgcacagaagacaaaggctttcagagattcctggacaatgtgcagtacaaatccactggaatcttgcgttatgagcgcgtgtttggggagggttatgttagcaccggtggattcgagaccacaaagg

SEQ ID NO: 8331 - DNA, 445 bp, Triticum aestivum
  Clone ID: LIB104-044-Q1-E1-D1
tacggtcgtacttccggggccaggggtgatgaaatcggagcatgctttatttattgattgtcttccttatgagtggcggtcggggacgagcgatggtcttttcctaccaatctatccccctaggagcatgtgcgtagtactttgtttcgataactaatagatttttgcaataagtatgtgagttctttatgactaatgttgagtccatggattatacgcactcacacccttccaccattgctagcctctctagtgccgcgcaactttcgctagtaccttaaacccatcatataccttcctcaaaacagccaccatacctacctattatggcgtttgcatagccatttcgagatatattgccatgcaactttccaccattctgcttattatgacacactccatcattgtcatactactttgcatgatcatgtagttgacatcgtat

SEQ ID NO: 8332 - DNA, 421 bp, Triticum aestivum
  unsure at all n locations
  Clone ID: LIB104-044-Q1-E1-D10
gggtcgacgggtgaagaaaacgcatcttgtcaaggctgctccggcggacaagtcgggagctgctgtgcgagaacggacctgagctgtgtgcggtggtgtcataaggagcctatccatctccactagaattatcccaagtttcacttcacatcgtgatgttgttttacctttttcctgtcattgtcctgctataacggatagcgctccctgttggcgccgccgccggcggggatgccctagtggtggagggtgtatgtcctcttccgcggggtgcccctgcttgtacctagatggttactctttccgtccattgtcaccggctaacattgtgataatatcagtctgggtaatgttagattaanaaaanaannnnnaaanaaaaaaaaaaaaaaaaaaaaaaaaaaaaaaaaaaagcggccgc

SEQ ID NO: 8333 - DNA, 250 bp, Triticum aestivum
  Clone ID: LIB104-044-Q1-E1-D12
gggtcgacgggtaacacccacttactatgtttttttttcttaaaaatataaatcatgatgttttttttttcatatctagcaagcttcatccatgttcacattgattgtcacccaccctcctcgacctgagtacctagttttctatactacgtctcggctcgtacttcagttctagatttagattagtttaataaagtggtactagaaaacatcaccatcgcatgcatggacaaaaggcaaaagcgacaag

SEQ ID NO: 8334 - DNA, 429 bp, Triticum aestivum
  Clone ID: LIB104-044-Q1-E1-D3
ggggcatcttgaaagttctaaaaaactttccatcatttgccacactactggttgcatatgaaaaacctacccaagcacagcacgatacaggagcgacgcacaattacaagctgatattctgttggacaatggaggctataaccaattacttttacgggaacaatagcacctaggcaatttgatgggtaggtatgaacaaaattggaactgcacatgtactgctaagtgattcaatacacacattaccaatcgaggaggagaatgatggtcgcggcggcctctgtgagtcatggtcggcaaaaggagtcaattcattgtccacgacggtggtgcttctgcgcttggcgtcggcttccgggaagcagatccgagaccgtggaagacggtgcccgggaaaacgctccgtgtacgacgaccaccgtggaccgg

SEQ ID NO: 8335 - DNA, 200 bp, Triticum aestivum
  Clone ID: LIB104-044-Q1-E1-D5
tactttaatgctgactcgagcttagatggaaactttatcagtttatggactatttgtggcacgagcgctatttatttgcgaagcctttggttgaatcttagtggaagattctttcgagttcgagtagataattttgtcggttttgaggaagtttgaggttgcttccacgtgtggaactagatcaggacgttatttagttt

SEQ ID NO: 8336 - DNA, 422 bp, Triticum aestivum
  Clone ID: LIB104-044-Q1-E1-D7
ttccgggtcgaccttcaatgccaatgaaaggtactcttcgggatcattgcttccagtaaatttgggcatggtgaactttagtttgccgtagcgttgctcttcattgtgttggggtcgagggtgatgacgaccttgacaaggaggattgtctccctcaacttgctcttatcatggagggttgtcaacctcattttgttcttggcgaacttgaggttcttgtcgaggagcttgtggaacttgacgatgcagtcgagcttgatggttcctctcttgaacttcctcgcgaagcgcttcttgttgctcgcgcgtgtgaccgttgcggtcggcgatggcgcgacttgtttcatggagggcacattgggccttgagtgcttgagcttcacgtcgttgttgttgttgtcggagcgcctcggtgtcttgct

SEQ ID NO: 8337 - DNA, 437 bp, Triticum aestivum
  Clone ID: LIB104-044-Q1-E1-D9
acggggtcatttagaacaacatggtatttgctatggttacaaagttggtcctagaatgatgagcatccaagttgggtataataaaaactaccatagaaaagaattggatgctatgatcaatatgatgcttgataattgttttgagatatggaggtagttatattaaagtcatgctagttgaggtgattatgaaaagtacttgtgttgagggttgtgattcccgtagcatgcacgtatggtgaaccgctttgtgatgaagttggagaacaattttatttattgattgtcttccttatgagtggcggtcggggacgagcgatgatcttttcctaccaatctatccccctaggagcatgcacatagtgctttggtttttgattacttctagatttttgcaacaagtatatgagttattttgactaatgttgagtccatgg

SEQ ID NO: 8338 - DNA, 442 bp, Triticum aestivum
  Clone ID: LIB104-044-Q1-E1-E3
tacggtcgtagctccgggtgcacggggaggttgaaaagctgattggcaggatagtgaagtggctgaagcccggtgggcatattttcatcagggagtcctgcttccaccagtctggggattccaagaggaaagtgaacccgacgcactaccgggagccaaggttttacaccaaggtgtttaaggaatgccactcctatgaccaagatgggaattcctttgagctttctctggtaacttccaagtgcattggagcttatgtgaagagcaagaagaaccagaaccagatatgttggctatgggagaaggtcaagtgcacagaagacaaaggctttcagagattcctggacaatgtgcagtacaaatccactggaatcctgcgttatgagcgcgtgtttggggagggttatgtcagcatcggtggattccagaccacaaaacgaat

SEQ ID NO: 8339 - DNA, 341 bp, Triticum aestivum
  Clone ID: LIB104-044-Q1-E1-E4
gggatgaaagaggcggagctcaaatcgaagaaaaactagacaagatgcagcacaacgacgatgataatgtcgactgcggcgttggtctcggatgtgtacagaataattcctcgctatcaggtggtaataacgcaccggaacggacgctgttcttgatgcgcggaatggcaaggcaaagcattctttcaccgagcaatggtgattgacgacttgattacagacaagatagatttggcacattcttacctgtaaagataatttgccaaataaagccgtttataagctttgccactttgataatctcttgtactgacacaatttgaaagaattcctttgagatc

SEQ ID NO: 8340 - DNA, 303 bp, Triticum aestivum
  Clone ID: LIB104-044-Q1-E1-E6
tacggtcaccattccggtcgacgggcgacaggagagtgatcaagcagagcgaccttggcctctatgtgtttgcgtcgaagccgtcgagcggcgcggccatactgaggctgtagatcgaccaccgccggccgtggccggtcacttgtacatgcacacatactctcgaataaacgcgtgctcgaggcgagcacgctgccattagctaatttagtccccgcccatgcgtgtctgaatgtacaatgccagtacaatgtgtagtagttatcgttgtttattatgggcgatctgactgccacgttatct

SEQ ID NO: 8341 - DNA, 442 bp, Triticum aestivum
  Clone ID: LIB104-044-Q1-E1-E9
gacggggagggggagaaacatcataagatccaagtataatagcaaagctcgcgatacatcaagatcgtgccacatcaagaacacgagagagagagagagatcaaacacatagctactgcgacataccctcagccccgagggtgaactactccctcctcgtcatggagagcgccgggatgatgaagatggccaccggtgagggttcccctcccccggcagggtgccggaacagggtcccgattggtttttggtggctacagaggtttgcggcggcggaactcctgatctaggtttctttctggaagtttctgtatatgtaaggggttttggcaccgagaacaagtcaggtgggtctccgggctgtccacgaggcagggggcgcgccccccaccctcgtgggcagcccgggactcttctggcccaactcttttcttctgggggg

SEQ ID NO: 8342 - DNA, 433 bp, Triticum aestivum
  Clone ID: LIB104-044-Q1-E1-F10
acgggtgtagataacgtcgaactcatcgccggtgatggttctaaccttgtactcaccgccgatcgtggagatttgggacgccatggatttgggaggagggttaggattagtggaactgccgtaatgtgaatggacgtgacgactaggagcaaaccaccatagtattgaaggacgtgcggggacgagtaggagcgaactgccagcgtgcgaatggcagggtagtggctttccattctcccatgatacgggcttccgagagcccttggatctgagatcgaacggttgcatggtgtgattctagacctatgggtgaatatcctatcctgaagggttattctgcaaattttcagcaacttagcatgcgaccgtttgatctcagatctaagggctgccagtagcccgtatcatggtcgcgcctaccacgaccgtcgcg

SEQ ID NO: 8343 - DNA, 438 bp, Triticum aestivum
  Clone ID: LIB104-044-Q1-E1-F12
cgggtcgaccgcgaaggaacgctcacctacggcggctactccagcatggtggtggtgcacgagcgcttcgtggtccggttcccggacgccatgccgctggacaagggcgcgcccctgctgtgcgccggcatcaccgtgtacacccccatgaagtaccacgggctgaacgctcccgggatgcacctcggcgtgctgggcctgggcgggctcggtcacgtcgccgtcaagttcggcaaggccttcgggatgaaggtgacggtgatcagctcatcgccggggaagaagcaggaggccctcgagaggctaggcgccgacggcttcgttgtcagcaagaacgccgacgagatgaaggctgcgatgagcaccatggatggcatcataaacacggtgtctgcaaacatccccatggcccctctcttcgggctactcaagcccaac

SEQ ID NO: 8344 - DNA, 422 bp, Triticum aestivum
  Clone ID: LIB104-044-Q1-E1-F3
ccgggtccccggggagcacaaaaaggcggaggagcacaagaagaaggacggggagcacaagaaggacggcgagcacaaggagggcatgatggagaagatcaaggacaagatcagcggcgacggcaagaaggacggcgaccacaaggagaagaaggacaagaagaagaagaaggacaagaagcacggcgagggccacaaggacgacgacggccacggcagcagcagcagcgacagcgacagcgactgagccagctccggcccgcgctccggcagcgtgcagtgtaggcgagatcgatgatgaacacttgggagaagtgtgacagacatatatgttgcagggtttggagcgtgtggtagcatatgtatgtaatgcgtgacatgcctcatggatcttgtgatgtataataattagccggccgcac

SEQ ID NO: 8345 - DNA, 420 bp, Triticum aestivum
  Clone ID: LIB104-044-Q1-E1-F4
tacggtcgtaattccggggcacgggaaactaaaaatctcaagtacatggaaggatcttacagtagggtgttgcaagacttccaactgtgaccagctgcagttggttcagcaaaaatataaatctctggagcatcaacagcaaaaatataaatctctagagcatcaacagaaagaaaacgatagaaaatagactatttgagcagcagctggtgcggtagtctgagtagagatttcatggtagcgaaggaactttgccgtataattgaggccaacttcacagaaggatcaacacccgaagacaacaatctgaatcgtatttctcatagataagatatgttgctaatcatcttaatgatacaactttacaatgagacattgtacaaaaaacaaacaagtatttttggagtctggatgatgata

SEQ ID NO: 8346 - DNA, 398 bp, Triticum aestivum
  Clone ID: LIB104-044-Q1-E1-F9
gacgggcatatacatacagacagacaggagagctgccttccgagccttggaaaaaaggcactgctgcctttgctctgctcatatccggactcagatgatatgaacatggattgcattgcagcaggcgatgaagaggccaacatagtctcggacttttggaaaaccagaagaggttattagcatgtaggagaagaggagcgtgtaaaggaaactcaaggcaatgcttgtatgtaacatacaaaaaataacaagttgtaaaagcggcctcaagttttcaaaaaaaaaaaaaaaaaaaaaaaaaaaaaaaaaaaaaaaaaaaaaaaaaaaaaaaaaaaaaaaaaggaaaaaaaaaaaaaaaaaaaaaaaaaaaaagcgggcgccccaaagggttcaagctt

SEQ ID NO: 8347 - DNA, 455 bp, Triticum aestivum
  Clone ID: LIB104-044-Q1-E1-G1
acggtcctatcttcccgggtcgccgggtccagaactccctcaatagcccctgaactagactttaatgatgatgtgttcggcgtgcagattgtcttcagcattgcaaggcaggttctttctccggatactccaatgcagtcctccacacataatagctgtatccggctccgttaaataattacagccttaagctgcaagggtaaaaatattcaaaacaaagtaagtcgcatccataagcaatttttccggtgaggcattatgtcctgaccttgttagtattctgaactgttttacaatcctcgcttcgtgttttgggttgtggctaggaattaagttaatggcaaacaaaccgtttttttggcgtgtgtttaatttctaaccctaagcggctgcatggttgaagcctgcaacactgcacggatgcatccattacattccttggcttataaaatttc

SEQ ID NO: 8348 - DNA, 433 bp, Triticum aestivum
  Clone ID: LIB104-044-Q1-E1-G10
cgggttatttgatatttttgtcttttttttcaaaaatataggagcaatttaagacatatcaaacccatgcttcaacatgataaattagtagaaactatgatcaaactatagtaggggccaaaacctgcgcattacatataattagcaactacaaatgtcatttaatgacattttcaaccttgacattggcacatatactatgcacactagtagcaggcgcatctagacatcctcatcctcctccgcggacgaaatatcatccatccacacataggggtcggactcatgagctgtagccacaatgtttgctcataatcgatggtatctgagatgtatttgatgatgatgatgatttttcttttggatgacgcttggcatgaccgcggcactgaggtgtcctgcgcattggacgtacgtgaagaaactcggtgct

SEQ ID NO: 8349 - DNA, 432 bp, Triticum aestivum
  Clone ID: LIB104-044-Q1-E1-G12
gacggggtagaaaaacgaatttaaccctgacagagggagagaaatacacgaagtgcgcatgtgtgattccgatgcccacagggaaatgagatatgtatgcgtgtgagagagattgcacaattcattcacgtatcactatctagcgatcgtggacgtgcatcgcttgaacataagtcaatatctacttcgtatcgtggccaaaggtacaatatcgattcaacgctataaagattggacactcacatatcacatttttttctatttcaataaaccttttcagttgtgcatgccaaagttacagtgatgtttcttcaaacaaccaatgtagctatcatgtatatgcaccattgttactcttgcattcaaattcattagtcttggatgatttatgtttccattttgaagtaatatatgtaatattcatatatgaat

SEQ ID NO: 8350 - DNA, 428 bp, Triticum aestivum
  Clone ID: LIB104-044-Q1-E1-G2
tccggggcaccccgactacacagagctggcattcgcggccatgatgaggaagaaggtcacgatgcccgcccacttgatgtacgacgggcaggacgacaacctgtttgagcacttcagcgcggtggctcaacggctgggcgtctacaccgccatagactacgcggacatcctcgactttctggtgcagaggtggaacgtcgccaacctcactgggctgtctggggaagggaggcgggctcaggatttcctctgctcactgggaccaaggttcaggaagctggaggagcgagctcagggcagggcgaagcagttaccggttgttcctttcagctggatccatggtcggcaagtgcaactttgagtgacattgcaaaacaattataagacgatttgttcttcttattttcaaaatatgaagcaactgttga

SEQ ID NO: 8351 - DNA, 430 bp, Triticum aestivum
  Clone ID: LIB104-044-Q1-E1-G9
cgggcaaatggaacggtatgattggaggtacctttatgcagactgtgatcctggtgtgggttaccgtgaggaccgactggaacaaagaggtggccgaagcgaggaaaagattgaacaaatgggaaggcaacaagatgcctctattagcaggccaagaatgaaacagtggatcctgtatatgatcaacggaaatgtggtccgttcgcaagttgatctccctaaaatgtgtaaagtgcattgttcatcgtgcaattcaccattgaaattccctacttccgttctgctattcccgcttcgcaagcacggtagcagcggcgatcttgtcatgttactagcgagtaacgggattctatggcgatgatagattagtgtggatgagatcactttttttgtgtgagatatcaatattgttggactgcactaagggtac

SEQ ID NO: 8352 - DNA, 424 bp, Triticum aestivum
  unsure at all n locations
  Clone ID: LIB104-044-Q1-E1-H1
cggtcctatattcncggggcgacgggctgccgcactaactgcggaggtgaatgcactaaagcagagcctcgaacggtccgagaatgagctcggccttgccaagaagtagctcgaggataaggaaggtaagtaataccttatgaaagtagtaccttatagaaaaggatttggttgcaaaaaatgacaagaataacgtgggtattgcaggggccacgaatgaggtggcgaccctgaaggaagcggtgtccaaggtcgaaagcagtgcggccttggagcgcaccgagcgagagaagcaggaggcgcgggtggccgaggtgcggcaagagctccaggctctcgtggaaaaacatgagaatttggaaggttactccaggggcccgagagtccgagcttgcctcggctcttgagagtggcaaagccgcta

SEQ ID NO: 8353 - DNA, 426 bp, Triticum aestivum
  Clone ID: LIB104-044-Q1-E1-H10
ttgaacgttttattgctcgatgcactacatgtcaaaaagctaagtcacgactcaataatcatggtttatatatgcctttgcctgtacctagtgtgatagaggcggggtgtcccgatctttcgatgagatgataaccatcgatttggtggagacgactttgacgatccgactacaaacgtgcaacgacgttgtgccttagcaatcgctaaaccaactccgagaggttattgaccacgctggagcacgatcaacctgaccacgaaggtctattcctgcaagcaatcgaagaacaagcaagaatatgataaaagcaatctgaatatcgcgaatatgtatgaagtattgataatggtggggatccgaaaagtggtcttggtctggtcgttggacacaaacgaagcacacgaagttgcaatggctaacttt

SEQ ID NO: 8354 - DNA, 349 bp, Triticum aestivum
  Clone ID: LIB104-044-Q1-E1-H2
cgggtgcacgggtccgtatgagtggggaaacaagagatagtgttgatttcggacccctccaccaagggccacgaaattcccccctcttcctccatatatacagcccttagggcatcgtttagaccttgggatttgtttagttaaaagttagccattgcaacttcgtgtacgtcgtttgtgtccaacgaccagaccaagaccgcttacggatctccaccattatcaatacctcatatatatttgcaatattcagattgctttatcatattcttgctcgttcttcgattgcttgcaggaatagaccttcgtggtcaggctgaccgtgcttcgggcatcgtcagtaacctca

SEQ ID NO: 8355 - DNA, 433 bp, Triticum aestivum
  Clone ID: LIB104-044-Q1-E1-H6
cgggaatccatagagaagctagcaccgtcggggacacgcaattttttgtcagatgtctaagggggcttggtttggatcttcattttgttttttccttgttcaaatttgtttaggttctttcggccactgccatggttggcattggcaatgctgttggattggtttggattggtttgtgagaggggcaagcgatgagcaaagataagggctgggctgagctttcctaaggagaggagagcttcactggagcccaattccggtgcccaaatggagcacatttcctgtgagaaattcaccccaaatctgcactgtttttggtacgccatagtggtggatgccatcttaagttgcatatggtgagatgctagctgttggatgcagtagtagcactgaaaggctgggggtttggccattgtttatagagccaagaaga

SEQ ID NO: 8356 - DNA, 385 bp, Triticum aestivum
  Clone ID: LIB104-045-Q1-E1-A1
cgggtattttgaatttcaaggaatttaattatgataattgatctttaatagattgtatttccttgtcgcaatccgtgttgaattctcctcatgcttatagccaaaataaagcttttactaaacatatcgttgatgctttgatgcaatcttatgaagaaaaacttgaattagaagtttctaccctagaaaactttatgatgagtgggaatccactattaaaattaaaaataaaaatcatgaaggctatgcattgtgtgatttgggtgctagtgtttccacgattccaaaaacattatgcaatgtgctaggtttccgtgaatttgatgattgctctttaaacttgcaccttgcggattccgccattaagaaacctatgggaaggatt

SEQ ID NO: 8357 - DNA, 156 bp, Triticum aestivum
  Clone ID: LIB104-045-Q1-E1-A10
aggagacgtggttttgttcctttccagttttcactaggatagagcactttcatttgcaggctatttttaacagcattgtctcccaaatagaacagccaagtcacattctttgcaatttatggattcacatttacacctatttttcacagcccatgt

SEQ ID NO: 8358 - DNA, 257 bp, Triticum aestivum
  Clone ID: LIB104-045-Q1-E1-A12
ctcatggggcacttatattattttgagagtcttctagagcagcatggtaatttgctttggttataaaattactcctaatataatgggcatccaagataggtataaaattagtcctaattttcatataaagtgcattgaatactatgagaagtttgctactttatgattgttttgaggtatgaagatggtgatattagagacatgctagtggagtaattgtggatttgagagatacttgtgttaaagtttgtgattcc

SEQ ID NO: 8359 - DNA, 262 bp, Triticum aestivum
  Clone ID: LIB104-045-Q1-E1-A2
gtattttgaagcaaatggcatttaattaggatactttatctttattagattgtatttccttgtctcttcccgtgttgaattctctccatgcgtatagccaaaatatatcttttacaaggggtggcgttgatgctttgctgcaatcttatgaagaaaaacttgaattagaagtttctactctacaagaattttataatgagtgggaatccaatattataattaatattaaaaattattatcgatatgcattgtgtgatttggg

SEQ ID NO: 8360 - DNA, 280 bp, Triticum aestivum
  Clone ID: LIB104-045-Q1-E1-A5
catcttcgatgaggaaggcgggcggccggacgccatcatgatcctgacggtgaagcgcgacaacatctgcagcttcatctcggagaccaaccccgggcacgtgcgggggtgggagaccaaggacagccagctgacgatggtggcggaccacctgaagccgcgggcggtgctgatgtgcccggagaacaagatgatccagtaggtggtgttcgccagctacgggaacccgctggggatctgcggcaactacacgtttggtacctgccacacgcccaaggcc

SEQ ID NO: 8361 - DNA, 350 bp, Triticum aestivum
  Clone ID: LIB104-045-Q1-E1-A8
cggggaaaaatatgatgaatgacaaggcactggttcgcaacttagctgcatgtgaaactatgggctcagctaccaccatctgcagtgataagacaggaacactaacacctaatcatatgagtgttgtcaagacctgcatttgtggaaatatcagagaggttaacagtcctcagaatgcgtctaagttgtgttcagaacttccagaaaatgttgtcagaactcttctcgagtctatatttaccaatacaggtggtgaggttgttattaaccaagatgggaaacaccagatccttggtaccccaacagaggcagccatattggagtttgcaatgtcaataggtggaaacttt

SEQ ID NO: 8362 - DNA, 275 bp, Triticum aestivum
  Clone ID: LIB104-045-Q1-E1-A9
atttgctcgacttctggcacgtttggcagtttatcacttttattcaccaacgcagactctagattcatgtgaaacttgtcacacactcagataccttggcatggggccatggttttttcagcagttaaggaatgttcaacgagtttgacataatgttcacacacttacaactttttcggcacttattcgatgttctggtttcaaaagtctaacctatccacagctccatgttgggggaaactccccttggattggtcacagttttttcgccattt

SEQ ID NO: 8363 - DNA, 325 bp, Triticum aestivum
  Clone ID: LIB104-045-Q1-E1-B1
catctacgtcgagcccgaggaccgcaagggggtcttctggtacagcaacaagttctagccgtcaagatccatcaacggtgctcgagaaagaactcagagaagagatccgaccaagtaattccatccatctacctacagtcatatggttagtctttagatagcagagggcatttgggcacaaaagaagacgactattaccgtgccagtgctagaagagctgagtggtgcaaggaagagtagcgtgtccgtgactttggtcagttccgtcgttactttttctctgtgttccagtcgtcggcttaagtttgggcggctgtcgtcgtcg

SEQ ID NO: 8364 - DNA, 391 bp, Triticum aestivum
  Clone ID: LIB104-045-Q1-E1-B10
gcgggcgtgctatgtgctaatcacgatagattcggtcgggcccgcgtcgcctctgtgtcgactgtcgtccgcaatgattgggtcgggccccagatgacatgggtgggttagcgtcgccgtgcagcatccattctaagttagtcccacctcggtcgccgaaggatgtaccgatcagtttatatagccgcctccggtattccatgcatggtcatatcttaaattgttatatacctctatatatctgctccgcaatacactatcaggcaatgaactgccctggcagttaggtaaagtcattatacaatattaaatatgtttactttgtcattttttttaaccttccaactgtgaaacattttttttgaaatattgcctcccaacaccatttttt

SEQ ID NO: 8365 - DNA, 192 bp, Triticum aestivum
  Clone ID: LIB104-045-Q1-E1-B12
aagctagtatatgatgatcatgaaaacgacatcctccttgttggagatgacccatgggaggagtttgtgagctgtgtgaagagcatcaaaatattatcatctgttgaagtgcaacagatgagtttggatggcgaccttggcggtatcccttcacaaacacaagcctgtattggttccgatgatgcaaatgca

SEQ ID NO: 8366 - DNA, 354 bp, Triticum aestivum
  Clone ID: LIB104-045-Q1-E1-B4
agccgcgcacgagatccagcactcgaggggatcaaccctaggcgcgggatgcgggtgatccgcctcgtgtaagaggcgaacctgtcgcccctcatggtgtacttcatggccaacaacgcgtgcttgcctgaccacttatatgcacaccacgacaagcccctcgaggagacagcagtcccacgtcttgccttgatctgatttcgttggcctgtggtcaactttctagcccatcgatacattatttttttccattacattgttgccgttcatatcgcttagcttctgcctcggttcgttgcttcattcagaactatgcctcttggtcgcatgttcttctcaatgtccgtcccttca

SEQ ID NO: 8367 - DNA, 345 bp, Triticum aestivum
  Clone ID: LIB104-045-Q1-E1-B5
gggcggacggagacggtgcacttcgacaagatcacggtgtggttcaagaagctcagctatgggctcagccaggagcaccgcgaccccgtgctcggtctgcgtcagggtatacatgggcgtcaccaccatccagctcgacgagctcgccgccgagaccgccgccgcgctcacggcctcccagcctgactatgcctccctcgcggcgaggattgttgtgcccaccctgctgccaagtgggaatactctgtgtggcgcttgtcagtagagagcattctggtacaaaggtacacgaactaatagggaaacttctgtcattttctttggtctctgatccataaatggtcc

SEQ ID NO: 8368 - DNA, 405 bp, Triticum aestivum
  Clone ID: LIB104-045-Q1-E1-B7
acatcgacaacgaaaagaagcataatgctgggacaaacaaagctgctcatagcaccacatcgctcaatacaaagaggcttgatgatgatacagagaatcttgctcatgagcgtgtgccgtcggagctgaagaagagcattatgcaggctagaacggacaagaagctcacacaggcacagcttgcacagctgatcaatgagaagccacaagtcatccaggagtacgagtcaggcaaggctatcccaaaccaacagatcatcggcaagctggaaagggctcttggcacaaagctgcgaggcaagaagtgaagctgcgtgcatctgacaggagtcgagtctttcaagagaggatcttggctgggcaagtttaccgctaaataaagcttgtctactaaatcatgcgact

SEQ ID NO: 8369 - DNA, 389 bp, Triticum aestivum
  Clone ID: LIB104-045-Q1-E1-B9
tcatctcatcggaagacgggacacctttgcctctatcaagtggtatcagatttccaggttgcccggtgagattttacagtttttcgcagctttgatcgaggctgtgcgtcagacctacagtccacgaaaaagccacagaaaaattagggttagttcatcatatccgaaccaatctgagcctttgcataaactttttagggttttgctttgttgaaattgcggctgcatcgtcctgtctagttgctggtcttagagtctagtcttttagagtttcgagttctggtcataagttgtcacgccgccgccgcaccatcatcatcgcccgtgccatctaccaccaccgcttatccgccagcgcttcgaatccgtatccatataccaccacagct

SEQ ID NO: 8370 - DNA, 299 bp, Triticum aestivum
  Clone ID: LIB104-045-Q1-E1-C1
ggagagcaagcaggacggtaagaagggagcagtcgccgtcccggacgccaaggggaatgggacggcgaccgaggaggctgccgggccgatcaaacacgatggcgtgggccataacgaggttgtccccgatcgggacgacggtgtggcatcgacgagcgacaccatcatcgtcgtcgaggagattaggaatggccatcccgtcgaggtgtcgatcgcgcctaccgtcgaggcgggaagagaccgtctgcggtgcgaggattatgaacggtggtcggtccatgcgaatgaagacgacgcgg

SEQ ID NO: 8371 - DNA, 415 bp, Triticum aestivum
  Clone ID: LIB104-045-Q1-E1-C10
tcaccacaggctaatgtgttttgcttggagcgtctttattatttgtgtctttgcttgttagtttgccacaatcatccttgctgtacacacattttgagagagtcatacatgatttagaatttgctagaatactcattgtgcttcacttatatcttttgagcttgatagttttgctcattgtgcttcacttatatctttaagcttgatagttttgctcattgtgcttcacttatatcttttgagcttgaaatttttgctctagtgcttcacttacatattttagagcacggtggtggctttgttttaaagaatacattgatctctcatgcttcacttagattattttgagagtcgttaataccatggtaatttgcttaatgtcaaaatacttggtattcaggatatatgaaacttt

SEQ ID NO: 8372 - DNA, 326 bp, Triticum aestivum
  Clone ID: LIB104-045-Q1-E1-C11
tcaagttcacggcatgcccaactacctcggattcaaggtctaaacgcgcatgcatatgcatgcatgcaacgcctgccccctgtacatgagataccgatcgaggtaaacgtaatgtgtgtacggaacgtgtgatgactgatgcttgcatgattgtttgcacttcgctgctccgttatcaccctctgttcttttctggagttctcttttccctggtaaatgattaagtgtatgttgtgagttgtgacattgattaactggaaaatgtatcattcagatgctcattaactgcgtccgcgttgctaatactactccattattttatgctc

SEQ ID NO: 8373 - DNA, 397 bp, Triticum aestivum
  Clone ID: LIB104-045-Q1-E1-C12
gaaatatagataaataatattttgagtgtcatactttcactgtcaacacaacaactatgagatggttgtatcttccatactacatgcattataggcagttcccaaacagaatggtaaaggtttatactccccctcctccacaagcatcaatccatggcttgctcgaaacaacgagtgtgtccaacattcaatgggtcacagggggagttttctttaattattttgatttgctttgatctttttggatcatgggactgggcatcccggttaccggccctttctcgtgaatgaggagcggagtccactcctcttgagaataacccacctagcatggaagatataagtaaccctagttgcacctgagctgctccagcatacaacacagaatttcatttga

SEQ ID NO: 8374 - DNA, 324 bp, Triticum aestivum
  Clone ID: LIB104-045-Q1-E1-C3
tgtttttttttttttatttgtaggggttgggttttttttttaatctatttttttgatatatcttcttttatggggtttttatgatgttatttttttgtttttttgtttttttttttttcttttggttttttttttgtttttggttttttttttgtttgttgtttttttttttctttttttttttttttttttttttgtttggatgatttgttctttttggtttgttgttttgtttttctttatttttttttctttttttgtatttgttttttttttgttgtttttgtttttttttttttttagtttgttttttctttggttttt

SEQ ID NO: 8375 - DNA, 245 bp, Triticum aestivum
  Clone ID: LIB104-045-Q1-E1-C5
cgggcccaaacagagcgtcacacgcaagtatcgagtgtcgtgtaggacaaccatcgactgcatgtggccaaaaaaatttatgtatgaaagggttgtgtaatgttttgaataacaatttggcgagtctaatgtggcatcggcctgcctaacaaaacggccaacccacaccatggctcacaactcgtactgtactacgacccagccaccacccccacacgcacacacccaaacagcacatcgtaaca

SEQ ID NO: 8376 - DNA, 261 bp, Triticum aestivum
  Clone ID: LIB104-045-Q1-E1-C8
cgggaatcattatgtatttctacatctgctatcaccgtcgcagccagagtcacaactaatgtcaaccaagccatagcctatacttgacttgcagttgcacatgtaagcttccaggcatgaggtagtcttccctctctttgagtcagggtgaagctttccgcaagatgtcatggcgcctctccatgcatcccggccatctactggtttctccagggtgctcgtcaaccgtccttcacccattactctctagtgaactcttgt

SEQ ID NO: 8377 - DNA, 301 bp, Triticum aestivum
  Clone ID: LIB104-045-Q1-E1-C9
caacgcacaccaggtgttcgacgtaatgtttgcacggctgtcggtaaaagaaaatcacttcgatccatataccgtttcaaaggttatatgcgtgttccatcctaagcatacttatagttctttagatacaacttttgtgatattttagcttaagcattagcataggactggccactgattattgcagtttggaaatatgttgaaagaaaactttactgtcaaaaaaccctccaaatgaaataggatgcattgttaaatggactgtgccttaacccttgtttggtataaacttcatggatga

SEQ ID NO: 8378 - DNA, 181 bp, Triticum aestivum
  Clone ID: LIB104-045-Q1-E1-D10
ttgggcctaagggaatgcattgtggagtagttattagatgatgggttgctagagtgacagaagcttaaaccctagtttatgcgctattccgtaaggggctgatttggatccacatgtttaatgctatggttagattttatcttaattcttccttcgtagttgcgatgctcgtcagaggggt

SEQ ID NO: 8379 - DNA, 418 bp, Triticum aestivum
  Clone ID: LIB104-045-Q1-E1-D11
cgctgaagcggctgctgcggaaccgcgtgtcggcgcagcaggcccgcgagcggaagaaggcctacatgacggagctggaggtcaaggccaaggacctcgagctccgcaatgccgagctggagcagaaggtctccaccctccagaacgagaacaacacgctccgccagatactgaagaacacgacggcgcacgccgggaagaagccgagcggcggcaaggggggagacagcggcaagaagcaccaccaccacttcggcaagggctagtatcaagaccgagcttctctgctgcgacgatggttgctacgaaccacccaacgtctgcccatctgaccattgttaggacactgctgttgttgtttgctgccgcagtttgacgcttggcttgtcttcttctttttcactcctctcttctccac

SEQ ID NO: 8380 - DNA, 386 bp, Triticum aestivum
  Clone ID: LIB104-045-Q1-E1-D12
acatcttgtcaaggctgctccggcggacaagtcgggagctgctgtgcgagaacggacctgagctgtgtgcggtggtgtcataaggagcctatccatctccactagaattatcccaagtttcacttcacatcgtgatgttgttttacctttttcctgtaatccggtggataccctcccccgccgggctggcctggttaccctatgccatttgttccggtgcaagggtacggagctccacctggtgcgtaacctcaccccggaggattgcctccaactcggttgtcactagaacattaccaagttaacgtgtgctggttatgccgtcgatgatatatacacgaacaaagtcttcaaagaaaggaaaaaaaggtaagggtggtggcttc

SEQ ID NO: 8381 - DNA, 409 bp, Triticum aestivum
  Clone ID: LIB104-045-Q1-E1-D3
tttttttttttttttttttttttttttttttttttttttttttttttttcttttttgtttttttttttttttttttttttttttttgttttttttttttttttgggttttttttttttttttttttttttttttttttttttttttttttttttttttttttttttttttttttttttttttgttttttttttttttttttttttttttgtttttttttttttttttttttgtggtttgtgtttttttttgtttgtttgttttttgtgtttttttgtgttttgtttttttttattttgtttattttgtttgtttgttgttttttttttgttgtttttttttttttttttttttttgtgtttgtgtttgtttttgtttgttttttttttttttttgtttggttttttttt

SEQ ID NO: 8382 - DNA, 224 bp, Triticum aestivum
  Clone ID: LIB104-045-Q1-E1-D4
tacacacctacctcggcttagacctttgaacgtcgggccggtaggtttcacgggccagagttagaaaagtagtttccttctactactaaacattggtctcacggggtttcgggcgagtagagggtcttttggcgcttcgtttgatattttgatacagaagcagtcacatttagtgcactcatcagctttgaggtttggtctatactgacagcggtttactttga

SEQ ID NO: 8383 - DNA, 297 bp, Triticum aestivum
  Clone ID: LIB104-045-Q1-E1-D6
cgggcacaagcatgtgttttgcttggagcgtcattttattttattttgttttgcttgctgttttattttattttgttttgcttgctgtttgtatagcataccaagatctgaaattcgggggtgttaaatattcttcagatatttacttaattattcgattacacattggatattaacgatatgactttcggactagtttgtcgttgtcgctagtgcactgactcatatctttttataacattgtagttgtcattatttatgtagaaataagcataatgctcatgcttaaactagaat

SEQ ID NO: 8384 - DNA, 299 bp, Triticum aestivum
  Clone ID: LIB104-045-Q1-E1-D7
acgggcacaattaacttccccttcgtgcttaccgaaggatgattgctatgatgattgttatgatcccgttgattctcttgaaatatccctttttgatgatgcttgctatgcttgtgggcgggatgccaatatgaattatgcttatggagatgaacttgctatagttccttatgttaaacatgacattgttgccattgcacccactcatgacagtcctattatctttttgaattatccaaactacgctagatcagacaagtttgtgcttactaaggattagattgatgggtttcgtttta

SEQ ID NO: 8385 - DNA, 175 bp, Triticum aestivum
  Clone ID: LIB104-045-Q1-E1-D8
acgggatcaatgaagttactgtcttgcttttctcttccgatcgttctgttgcatacttatatgttgcttatgtattgtctgtgatttggtacgaacgtttcgtttggctagtgcattggggtgcgtgcgtatgtcgtgtgtaatggtaatgttcgcggtgtctacgacgactggg

SEQ ID NO: 8386 - DNA, 308 bp, Triticum aestivum
  Clone ID: LIB104-045-Q1-E1-D9
tatccatcaggcaaggatatgatttggtatgtatatgtgttggtatgcttgtcgaaagtattttcatatgtgtgtgtatatatatatgtgaaattgaatgaatttaaaaaaaaacagagaaaacatgggctatacatgctctttgccgtctgctggtacacagcaaagagctttgctgtctgctggctgacagcaaatatgccatgtgtcagctacctgtccaacttggggcaataagctggctatttggatgccttgtcgttaactggcaaacggcaaaacacgccgttaacccactaaccgcctgt

SEQ ID NO: 8387 - DNA, 237 bp, Triticum aestivum
  Clone ID: LIB104-045-Q1-E1-E1
cggctgaaagcaagtacgaaatcgggtccttcatgtcagccacgctaagctgcgaccaccgggtcatcgacggtgccatgggtgcggaatggctaaaggcattcaagggctacctcggggacccgatgaccatgctgctgtaagagttctttttctctgctgtaaatcatgatgatgggagcagtttttctgtgtagctctcacaaatatagaccacactcaccacgcctgattttt

SEQ ID NO: 8388 - DNA, 227 bp, Triticum aestivum
  Clone ID: LIB104-045-Q1-E1-E10
atagtcctcatcagagatctcgaggactccacatagtactatccgagccttaacctggagcaaacttcaagttttagggacttggttgaacatagggggggtgtccttacatgatttaaccatgaccactatttcgttcgccaagaaaatctttggcgacaaaatgcactgaagactcgagctgtcccattgaactgttccgatatgttggcattcggggaaaattt

SEQ ID NO: 8389 - DNA, 375 bp, Triticum aestivum
  Clone ID: LIB104-045-Q1-E1-E12
ctggtgcaaatcaggcacgagctcctcaggaagaacgtgtcccgggtggacctggagaccggccggaacgtggagatgcccggcctaggcaccaacgcggagcagctcgccaagttcgcaaagcacctgtccgacgagcggggccggcgcaaaaaggtgcttcaaattaactaacagctggcaggccggctcgctctactttgttgagtcctgctcgtttggtggatgttttccattcagtttttttcttcttgtacacagtgatgtaatatttgtacagttatgtaataatactgtgccacatttggaaaatagattaagggtgttccatgttttgccggagcaagtgttgattaaaaaaaaaaaaccaactct

SEQ ID NO: 8390 - DNA, 222 bp, Triticum aestivum
  Clone ID: LIB104-045-Q1-E1-E5
cgggattaaccaatattctattattcttattctgttggcatcttggtagaacctaccttattggggttttctaatgttacctttatttattttataacttatctggtgagtatttttaggggtgtgcttacgttattgtgtttctgaatttggtatgatttgtggttgtctctttggttcgtttgttgtattttttcgttttagttatttttgttctttggt

SEQ ID NO: 8391 - DNA, 252 bp, Triticum aestivum
  Clone ID: LIB104-045-Q1-E1-E7
acatctcgaagcaagccgacgccgacttcgtgcgccctgagctccggcagtcctcctaggctcgccccttgcacctaagttaactaagctgcgccgggccggtcggggcccggcaggagggttggtttttgatggatggacattcatggactgtaatgtatgtgtgcgactagctggtttgaactcgtgagctgctgctgggtatagtgagtcgtcttcgtttccagagtaataaagttggttcgtccggtc

SEQ ID NO: 8392 - DNA, 317 bp, Triticum aestivum
  Clone ID: LIB104-045-Q1-E1-E8
acgggggcatcaacgaggaggatgaggatggtggatatgttgcgctggatggtggagcagccgaccagcctcaacttgaccgtgcctctagcaacgaagcatgcgcgagcatgccgcttgccgctggtgatgatcaagccaaactctccagtcggccactcctctatccaaaattgccgcctccacagagctgcgcaattcgcccgttgctctcttggcccgatcttgcatctttaactttgctttcctgcttgtttactttttgaatacctattcgttaaatttgcgcacttccacccagtggggtgtgtatttat

SEQ ID NO: 8393 - DNA, 254 bp, Triticum aestivum
  unsure at all n locations
  Clone ID: LIB104-045-Q1-E1-E9
attgtttctttctcggccccacttttggcctattgttatggactggttgantcttgttgcttttggtgattacatgttccgtttgctgatgtttaggatgtcaatgtatcttgatctcgccgaactaatgattggaagcatgatacccttcaacgtcgtgtccataatggcgttgattatttcatatttatgcatatttagtaagatgatgcacttttctgggaagaaacatactttgatttttggtcgatatc

SEQ ID NO: 8394 - DNA, 226 bp, Triticum aestivum
  Clone ID: LIB104-045-Q1-E1-F1
gagatctcaatgaaagagatttcggtctggttaaggtaacgcaagttatgccagtttgtcgagtctagccttgtaaacgccgggccctccgtatgtgggaattcaacccggagggacgaggagctattcaacatttcctcggcatgatgctcgaacaaatgtacaaatcgttctctggaccccaaataaagtgtccggatacctctaaggacgtgggtttgagctg

SEQ ID NO: 8395 - DNA, 365 bp, Triticum aestivum
  Clone ID: LIB104-045-Q1-E1-F4
gggggttgttttttttgtttttttgttttttttttttttttgttttttgtttgtttttttttttttttttttgttttttttttttcttttttttttgtttttttttttttgttgtttttttttttttttgtttttgtttgttttttttttttttgtttttttttgtttttttttgtttttttttttttttgtttttttttttctttgtttttgttttttgtgtctttttttcctgtttttttttgttttttctgtttttctttttttctttcttgttttgttttgtttttttgttttttttttttggttttttctttttgttttgttttctttgttttttttttgtttttttcttttgttttttt

SEQ ID NO: 8396 - DNA, 311 bp, Triticum aestivum
  Clone ID: LIB104-045-Q1-E1-F7
acgggtctaaccaacaggcccaataaggcccatatacctcccggggggttccggtaacctcccggtactccggtatactcccgatttcacccggaaccattacgatgtccaaacatagggggcgagtatatcgatctttacgtctcggccatttcgagactcctcgtcatgtccgtgatcaaatcctggactccgaactaccttcggtacatcacaacagataagatcataataccgatcgtcagcgaacgttaagcgctgcggatcctacggggtcgagaactatgtagacatgaccgagacatgtctcc

SEQ ID NO: 8397 - DNA, 151 bp, Triticum aestivum
  Clone ID: LIB104-045-Q1-E1-F9
tcgtaggtgattatgtgatgctgaagtatcaatgatcccatttcacgttcgggttcgtgtaatgcatgcatgcatgtacattcaattcgttcactttcaaggtgtatgatttggactagtatttcacgtcgttgtttcgaaatctctcaat

SEQ ID NO: 8398 - DNA, 386 bp, Triticum aestivum
  Clone ID: LIB104-045-Q1-E1-G10
tccgccattttgggggatcacgagaggttcttggtccggttcggagagaccactgtagctttcagaagggcgggcccctgctgtccgcaggcatgagtgtgtatacgcccatgaattatcacgggctgaatcgctcccgtgatgcaacgcggcatactgagcctgggggggctcggtcacttctacgtcaatttcagcaaggccttcgggatgaacgtaacggtgatcatctcatcgacggggaagaatcacgaggtcctcgataggctaggcgccgactgcttcgttgtcaccagaaaggccgactaaatgaaggctgcgatgagcaccatggatggcatcatacacacggtgtttgcaaacatccccatggtccctctcttcgg

SEQ ID NO: 8399 - DNA, 215 bp, Triticum aestivum
  Clone ID: LIB104-045-Q1-E1-G11
ttggagaagaacccgccttgcaatgccgatgacactctgaagggcaagactcagcttcattgaatcctggttcgggggctactgagggagtcctggattaggcggtccttggacagccggaccatatcctttggccggactgttggactatgaagattcaatattgaagattttgtcccgtgtccgggtgggattctcctttgcatggaatgcaa

SEQ ID NO: 8400 - DNA, 365 bp, Triticum aestivum
  Clone ID: LIB104-045-Q1-E1-G12
cgacggggtagaatagggtgctatagctcgaagatgggaaggcaggagaaggaagaaggcatgagaaaagggaggaatctttatcctcttatataggcagtgtatatcaaacgccccccggcccgcccgctcaagccttaaaacttgcccgttcccatggggtcgtgcgaatggcatggttatattacccaaaccgtattgatgaggatcccgcaataagtggacacgatctccattttgacaagacatgtaaatagaggccgcgcctcgagacgctaagcgggaggcgaaaaacggtccgaaatgctaaagaggccacatgtggcgtttcgccgaaaagttgtgagttgacgggcattattttg

SEQ ID NO: 8401 - DNA, 463 bp, Triticum aestivum
  Clone ID: LIB104-045-Q1-E1-G3
acttacgcgttcattttttctctttttttttctttctttttttttttttttttattttttttttttttttttttttgtttttttttttcttttttttttttttcttgggtggttttttttttttttttctttttctttctttttgtcttcttttttttcttttttctttttttttttttctttttttttttgtttttttttttttttttttcttttttttttttttttttttttttttttctttttttttttttttttttttttttttttctttttgtttctttgtttttttctttcttttttttttttttcttttttttcttttttttttttttttttttctttcttttttttttcttttttttttcttcttttctctttgtttttgttttctcttttgttttgtgttttttttttctatttttttttatgtttttctctgtttttctttctttttttcttt

SEQ ID NO: 8402 - DNA, 99 bp, Triticum aestivum
  Clone ID: LIB104-045-Q1-E1-G5
tcagtatcaatatttttatactatattacggtggtgtattgccgaaatgtctgttaagctgatttttgtttcagttatatatatctttatccctctcat

SEQ ID NO: 8403 - DNA, 356 bp, Triticum aestivum
  Clone ID: LIB104-045-Q1-E1-G6
gtgtagggattgccatgtaacgattgcactagagctatgaatgctcaacagaataaaactagtgagtgtgcatccaactcgcttgctcatgggggcctagggcatttgaggaagcccatcttaggaatatacactccaagttccataatgaaacattcccactagtataaagcgacaacttatgagactcactacatgaataacaaggtgctattttgaatcacattatatgagattcactacatgaagaacaacgtgctactttgaagtacatgtgttgaagctacatactagcattgccccttttttttcgtttttgggccttttttggcctttcattttttctctgtttgctt

SEQ ID NO: 8404 - DNA, 395 bp, Triticum aestivum
  Clone ID: LIB104-045-Q1-E1-H1
tagttcacactcagggctaaggtatgtaccagtagctatgtgtttgatctctctctctctctctcgtgctcttgatttggcacgatcttgatgtaccacgagctttgatactatagttggatcatatggtgtttctccccctctaccttcttgtgatgaattgagttttacctttgaggtttcactattatggatttgagaactcttgatgtatgtcttgcgtgggatacccgtggtgacaatggggtattctattgattcacttgatgtatgttttggcacacaactgcggattcccgaggtgacattggggtaatctatgcatatgggttgatgcacgtgttttccttgtttctcctatagaaagcttggggcactctttgaagttctctgtg

SEQ ID NO: 8405 - DNA, 213 bp, Triticum aestivum
  Clone ID: LIB104-045-Q1-E1-H10
ttttattgctcgatgcactacatgtcgccacgccatttcttcaaacctacttcacctcccgactttttttgcaatccgtatgcacaattcacagcgatctcacggcttgtgcccacgttctgacaccatctgcgacttttcagtcatttaccgatttgtgtagaaaccttatcgcgcgtcaaatggtccatcactacaaagtcgaactcggaa

SEQ ID NO: 8406 - DNA, 206 bp, Triticum aestivum
  Clone ID: LIB104-045-Q1-E1-H11
gagacctccgtcgtggtccccgtcaacagcgaggaggacgcccgcatgggctaagcctccgtcgtggtctccggctaatgaaaatcttacaaagagggttccggcctccgtcatggtctccggcaagggcaaggacgccgtcaagccctcatgtacggcgcagtatccctgcgtcaagcggcttcttgagcggcgcctcctctcct

SEQ ID NO: 8407 - DNA, 77 bp, Triticum aestivum
  Clone ID: LIB104-045-Q1-E1-H2
caccccgcccgctggtgtcgctcatggcttctttgctgtcgcgctcgctctctctctcttcccgccctgtcccgttc

SEQ ID NO: 8408 - DNA, 191 bp, Triticum aestivum
  Clone ID: LIB104-045-Q1-E1-H6
catgcttcatctttgtcatattgctttgcattaccatgtcgttgacatcgtatttgtgccaaatccacctttcataattatttcatacatgtcgctcttgggggggtgcatatcccggtatacctcactgcggcacgcacatacactcatattctgttccaagtactgccttgtacttcctcatttctccc

SEQ ID NO: 8409 - DNA, 422 bp, Triticum aestivum
  Clone ID: LIB104-045-Q1-E1-H7
cgggaaagagttattcatcatcgaagggcaaggtttctgcatcgatcgaggatgacgatgatgacttcatgtagtttttatgctgtatgttgtgagttcagttacataccatttaatttatttgtagttatatctaattgtttgtaatgtctcgttgtatgaatattatgttctatctaaatttgatcttgtagttccgataacagagtactaaaatagagtaggcatatgtctcgtacataagtacatagtcatttttctcatacatagaatagacataagtctcacacagaaatagatggtaatgtctctactgatagatagaagcgtcagtgacgacgtctggcctggcggggaggcggatctggaatcagggaccatcccaacctgtcgggtgccctaacatgacgatgaagaatctc

SEQ ID NO: 8410 - DNA, 406 bp, Triticum aestivum
  Clone ID: LIB104-045-Q1-E1-H8
gatatcgtttcgtccccaaaggtgggacattccctaccgaaaccatcgcttgttgtgagaagctctggtttgcgagaagcataaaccccaaccttccccaaatgggacaaaaaatttaccacggcatgttgatgccgctccataatagcatgccaagtttcatgaatttcagaagagttttggatttactagaatttaaaaaccaggcatctcaaggttttgccggcaatcaacggtgccctggtgtttgaaattcattgccatttcttgcatgggacctaagcacgtacccaaggacacagatttgatttttcaaccaattgatatgcactggagcatgtgcatgtacttcaaatttgaattatgcacataaatgcactgaaaacccaatttaagcattaaaatg

SEQ ID NO: 8411 - DNA, 422 bp, Triticum aestivum
  Clone ID: LIB104-046-Q1-E1-A10
ttccgggtacacgggaaggccacacataatatggacctcaagctaaggaacaccgacactggcgagctcatcatgcacctggagtgggttaacctccccccaggcatgtcgcggtgatttgatttgatttgcagagggaggccagctattgtctgccttttgtgatcgtaatgttgcttcctctatatatgagctatgacaataattaagcgatgcctatctcattctttacataacacccaccgtaatgatttgtggatctcaccaggatggtgcgtatataatatgagcaacgtcgtggtgagatccgcagatcatcacagtgggtgctacgtaaggcatgtgatagacttatgctgctgggggtaatgcttgctttcagttttggttctgcatatgttgtatggctattttaatacaaa

SEQ ID NO: 8412 - DNA, 412 bp, Triticum aestivum
  Clone ID: LIB104-046-Q1-E1-A12
ttcccgggacgacgccaagaacggattctatcaatgtatcatcagtatcaatcactacatgacaccacacaacagatatgctgctgtcagcagtcctctctaaatagtcactgcaattatcgtataagtacatcattgctgctgtcagcagtgctctctaaatagacactgcaattatcatgtacatcattgctgctgcaatgaaccattaagaattatttaaaatctagcctaccatctgcgttgtcgtcaacagagggttgaggcggagttacaaaatctgtatgagaaaccgagggattgtccgagtcagcgacatctttgttatcttcagagctgtcagaagcagctgagatggcgtcacctgattctgaatgtgttctgtccacatatgcttcaggtaaggagctct

SEQ ID NO: 8413 - DNA, 349 bp, Triticum aestivum
  Clone ID: LIB104-046-Q1-E1-A3
taggacgtttgagcttgatagtttttgcactagtgcttcaactacatcctttaaagcaagggggggttctcattttggaaaatgcaccgccctggctaattaaatagtttggaatcttttaacaaaagggttttggtatgatcaaaaaattggcccaaaaagaagatcaccaaagtggggtacagtaagcactatcataggacgtgaattggatgctatgatcaacttgaaacgtgataattgttttgagatatggacgtagtgatattaaagtcatgctagttgggtgattatgaatttaaagaatgcttgtgttgaagttatcaagtcacgtagcatgcacgtatgt

SEQ ID NO: 8414 - DNA, 374 bp, Triticum aestivum
  Clone ID: LIB104-046-Q1-E1-A4
ttatttgggcctagaggaacgcattgtgaagtaacaagtagatgattggttgctacagtgacacaagcttaaaccctactttaagcgttgcttcgtaatgggctgatttggatctacatgtatcatgctatggttaggtttaccctaatacttcgtatgtaattgcggatgcctgcaatacgggttaatcatacttgggatgcacgtccaagaaaggacagtattcaagcactggtccatccacatatcaaattatcaaattaatgaacgccaatcatatgaccttgatcaaatctagcttgacgataattcccatgtgtcctcgggagcgttttccttcatataagaacttgctatcgattgtcctttgctac

SEQ ID NO: 8415 - DNA, 294 bp, Triticum aestivum
  Clone ID: LIB104-046-Q1-E1-A5
catgtctagctgtagtcgtcgacgacatcgtctgcgcatcggttcctagtggacaactgtgatgtgtgctgcaggcagatggtggggtaacgtggctcgggcggataggttcgtgtcgtgtcccattgcggacgactaacaggtgctgatacgtggggtgaagcatgacctagggaaccgcttgtccggccgtgcacggtgtttccaacttatcatccccatcgtcctgaattatcggtcttctccgctttcggttacattggggatatcggctgtcatgatattacatctgga

SEQ ID NO: 8416 - DNA, 403 bp, Triticum aestivum
  Clone ID: LIB104-046-Q1-E1-A6
gacgggctcacacatagccatagaattctataattttaaatttcggcgaagcccctagtgtccggaaggccaaattcggggcgctatccacgcctgggccggacaaagccggttcctcgctctaagcggcataagtctttagggactcaaaaaaacctctcgaacagcgaccggctctcgcctcatcatgacggtcagttttagctttctccactgaggtgctcgcccagctcaactggggcacaatcgcagtggttctcccagcgctaccttagccgatataacggaacgtaaggtaccaaaacatgggagccgggcaaacccaactattgacccaagacatgattcggagccaatgcatataatgctataagttcggggtgccgcacttgtgaaagtgttc

SEQ ID NO: 8417 - DNA, 428 bp, Triticum aestivum
  Clone ID: LIB104-046-Q1-E1-A7
cggggacactgagatgtgtgtggagaggaggtaacaaaaattatcttgagtattgtccggagggaggagagtccggaatgcatcaatgatacggttttggtgctcatacccaaggtaacaagccccactgctttatctcagtatagacctatcagtttgtgcaatgtgttatacaagatagcatccaaggtaattgcaaatagactgaaactcattctgccagacattatctctgaggagcagtccgcttttgtccccggaaggttaattactgacaatataatttcagcttatgagtgtctgcactttatgaagcggtctagatcaaaatcaaataatttttgtgcactgaaattggacatgatgaaggcctatgatcgggtagagtggacatatctgagggctatcatgactaaacttgggtttgc

SEQ ID NO: 8418 - DNA, 380 bp, Triticum aestivum
  Clone ID: LIB104-046-Q1-E1-A8
actgagaaactgatgcggatcgtatctgacgatggcaggcggcgacttgtgatcatacttctgaacgcacagtttcaaaacatctggagtgtcacctaaggtaccaagtccttgcaccagatttccttggatcttaatgtgagacatttgtcaaaggaggcttgtcacatgttgccgaagacggtgtagatattcccagttatgacaaagctccagcacatgctcatttccaacaattgaaactcacttttgatttgctataactttaatatcgaagatgcaaaacactatcagacactgaataatgcaataaggttttaatatgtaaaacgatcttgttgtaggtcgtatcacacgatgtgtacagacatgatgccaac

SEQ ID NO: 8419 - DNA, 399 bp, Triticum aestivum
  Clone ID: LIB104-046-Q1-E1-A9
attcccgggtcaacggggatcacacagaagccgttcagcacatgcagaagcgacggcagagcacaatattgccggccatcacagcgagggcatgatggagaagatcaaggacaagatcagcggcgacggccacggcgacggcaagaaggacggcgaccacaaggagaagaaggacacgaagaagaagaaggacaagaagcacggcgagggccacaaggacgacgacggccacggcagcagcagcagcgacagcgacagcgactgagccaactccggccgcgctccggcagcagcgtgcagtgtaggcgaaatcgatgaacgcctgggacaagtgtggcatacatatatgttgcagggtttggagcgtgtggtaccatatgtatgtaatgcgtgacatgt

SEQ ID NO: 8420 - DNA, 411 bp, Triticum aestivum
  unsure at all n locations
  Clone ID: LIB104-046-Q1-E1-B1
atttgaaaaaccataaaaacctacatgtaaaaatatgtaatcttacctgccagcaatctattagtaggttggttaaaaaatatgcaagaaattagcatgaaatctttattaactatagatacattttacacatatatcacacggtgtttgacttctcatcctcttaggttgcaataagatttttactggtcattacttaggcaggctctaatccgttatcagtgagtatagttagtgatagtgttgtgggggctcggctagagggttatcacgagccgtcctaagacatactatcagtctgtgatgatgtgttcacgtcaacctcacccaaaatggactgctcaattgattggctcctaattaaaattagttagtctgttgattcanaattaatcctccattttttccgct

SEQ ID NO: 8421 - DNA, 376 bp, Triticum aestivum
  Clone ID: LIB104-046-Q1-E1-B11
acaagtgcatgctttgcaatgtaagcatcacgcgaaatattgtataacggagatatgcattaaaggcagatggtgccgccgcggtcgagatccttcggaccgaggtggcccgggccaaaaaagcaagccccggagtaacagtgccgcttgccaagaaggaatctgcagagtttaaaggccgaataggctgctcggcgccaatgcggggagaaaatatccacgatgacgcgtgagctaaaagatgccgctagccgctgtgcaatccttgatgaggataataaagccaaaacggttgatcttaacaaggccttacgagaggcgaaggaagcacggtccgaatctagagcgccccgggaggagatccgacaagctgggg

SEQ ID NO: 8422 - DNA, 375 bp, Triticum aestivum
  Clone ID: LIB104-046-Q1-E1-B12
ccgggtacacgggcaaggcgcagtgcagttggagatcaagaagggccacatgtacttgtctcgtgggtgggagaagttctaccgtgcctacgacctgcagctggggtacttccttctcttcaggtacgacgacgatgccaacatgctcatcgtgaaggtgttcaacaagactatgtgtcgcatgcgctacgctgccgatgatgatgccggtacattctgcctcttcttattcctctacatttggctttgtctcacatctattgttaacggtcattgttgcattttggacaggtaatgggagcagcagcagcggcactggctacagccaaagcagcagcgactatggctgtagcgaaagcagcagcgattctggct

SEQ ID NO: 8423 - DNA, 430 bp, Triticum aestivum
  Clone ID: LIB104-046-Q1-E1-B3
cgctggaatagatgttgagtacaccatagtcctgggacgagagaaggatcaaaaggacaaaaaaaggaaaaagcccgcaaggttcaagtttggcttgaaggactaaggctgggggtacaacataggcaaggccgactttgaaggccggaatttaaaggacttccttgaaagcaaccaattcaaattcgtaagggtaaactttggtaacaacaaagaagtcctgggtcggataggcatcattgtaggcaacaccttcaacctccagaagaatcggctggtgtcctctccttagccttcaatgctgaccctggcaagagccatggttcatccttcatacagtaaactggagaaacctccatacacgtttcatcattatgcatggcagcggaatgtactagatatagaccacatccactacgctgcaatggat

SEQ ID NO: 8424 - DNA, 456 bp, Triticum aestivum
  Clone ID: LIB104-046-Q1-E1-B5
cgggtcgacgggaaaaaggagccatggatttcctgcaggggcggagcgtcgagaccatggtggccgtcgccgtcgcggtcgtcgccgtcgccgtgggcggcgcactcctcctccgccgatccaagaggcccaagggctgcttggatcctgagaacttcaagaagtttaaacttgtggaaaagacacaaataagccataatgttgccaaattccgatttgctcttccaacccctacctctgtgttaggccttccaattgggcaacatatcagttgcagaggtcaagatgctacaggtgaagaagtaatcaggccttacacacctactacattggattctgatctcggaaattttcagcttgttataaagatgtaccctcaaggaagaatgtcgcatcacttccgtgaaatgaaagttggtgattaaatgtccgtgaagggacctaaaggtcctttca

SEQ ID NO: 8425 - DNA, 364 bp, Triticum aestivum
  Clone ID: LIB104-046-Q1-E1-B6
acggggaagagtagagtgctgttaccgatgatacaggttagtcaagcagggagccagggaggatccatctgaactcttcgttctagcttatggtatctttgtttatggcatcgtctgtacatcgtctgtgtttttaggtttcggtgctcaatgttcttcgtgtcgaactcatccagtgtgtattctttccgtgttatactttgtcaagttcagagagacctgatgagtcttttccaacgcctctttcttgtttgtgagttatgatgttagccttcttcagacggataatagactttttcaataagtttatgagttctttatgactaatgtgagtctacggatgatctacaggctcaaactttaa

SEQ ID NO: 8426 - DNA, 253 bp, Triticum aestivum
  Clone ID: LIB104-046-Q1-E1-B7
cgacggggaagcgtagactgctgttaccgatgatacaggatagtcaagcagggagccagtgaggatgtagctgaactcgtcgttcttgcttatggtatctttgtttgatggcatcgtttgagcatcgtctgtgtttttaggtttcggtgctcattggtcttcgtgtcgaacgcatccattgtgtattctttctgtgttatactttgtcgcggtcagggatgtactgattgtctcttccatcgacgctttcttg

SEQ ID NO: 8427 - DNA, 438 bp, Triticum aestivum
  Clone ID: LIB104-046-Q1-E1-B8
acgggggaggtcagaaaagttgcttgcatgtgcgggtcgggaaaccttgctcaagtccgtgatccaatctattccaacctaccccatgagtacttttcttctcactaagaaagtttgtaagagcctgacttccccatggcaaaatatttctgaagcagctcacttgacaaaaaggcattgcattgggtgtccgggaaggaattggctatcccaaagtgcaagggaatgatgggttttcgagacccgcatcttttcaatctggccatgttgggcaaacacggctggcgtattattaccaatccaaactcactgtgtgctagagttctaaagggtcggtattttcctgatactgacttcatgcgtgctacaatccccaaatctgcatcggccacttggagggcaatagtagcaggaagaagcgccctacaaatgggtttg

SEQ ID NO: 8428 - DNA, 389 bp, Triticum aestivum
  Clone ID: LIB104-046-Q1-E1-B9
tggaactcaagctaaggaacagcgacactggcgagctcagcatgcacctgcagtgggttatcctcaccccaggcatgtcgcggtgatttgatttgatttgcaaagggaggccatctattgccttccttttgtgatcgtaatgttgcttcctctatatatgagctatgacaataattaagcgatgtctatcccattctttacataacacccactgtaatgatttgtggatctcacaccaggatggtgcgtctataatatgagcaacgtcttggtgagacccacacatcatcacattggttgctacgtaaggcatgtgatagacttatgctactgggggtaatgcttgctttcaattttggttctgcatatgttgtatggctattttaatt

SEQ ID NO: 8429 - DNA, 405 bp, Triticum aestivum
  Clone ID: LIB104-046-Q1-E1-C1
gggtcgaggcggagataatatactggggtgtggcgagtatttataaggacagggacggcgcagcgttattacgcaggtgcccctggcggttcacatctgaaggacacgtggcgatcatgcaacacattggaggttgttccatgttcccacgcatgcctggattgtcgggtggtcgttcccgcttctccggggttcaggcaagaaggattgagcatttaaaacagatttaatgcttgtctctgtatcttctgctgacaaggacgcagctaagacattcgacagtttcaatagaatgcatatgatttggatagatagatttgagacaggagcatagaaaggttagggtccgatcacattcacttagttcaaaagattcaaacgagaagacatagctataagtgaatg

SEQ ID NO: 8430 - DNA, 415 bp, Triticum aestivum
  Clone ID: LIB104-046-Q1-E1-C12
attcccgggacgacggggtgccgtacgggttcccgaccaggtacggcgccatggccgcgcagatgaaggcattctttgactccacaggctccctctgggagaagcagaggctcgccgggaagcccgccggattcttcgtcagcaccggcacccagggcggcggccaggagaccactgcttggacggcaatcacccagctggtgcaccacgggatgctgtttgttcccatcggctacacctttggcttgggcatgtttaacatggacgacatcagagggggcagcccctatggagctggagttcttgctggtgacggtagcaggcagcccagcgaggcggaacttgccctcgccgagcaccagggcaagtacatggccgccttcgtcaagaagctcggccaggcctgattctgagc

SEQ ID NO: 8431 - DNA, 404 bp, Triticum aestivum
  Clone ID: LIB104-046-Q1-E1-C4
tgaacgaggtcaccgaagtttgggctgttaaggataaaatcaagcagttctctgagactttcagaagtggctcatgggttggggcaactgggaaaccgttgacaaatgttgtctcagttgggattggtggtagcttccttggacctctgtttgtgcatacggctctccagactgacccagaagcagcagaatgtgccaaaggccgacaactgagatttcttgcaaatgttgatccagttgatgttgcacggagcatcaaagatttagaccctgcaactactcttgttgtggttgtctcaaagaccttcacgacagctgaaacaatgttgaatgctcgaactatcaaggagtggattgtctctgctcttggacctcaggctgtttccaaacacatgattgctgtc

SEQ ID NO: 8432 - DNA, 420 bp, Triticum aestivum
  Clone ID: LIB104-046-Q1-E1-C5
actcggaagtgtaggccatttaaaccattatcaattgggactaggcatgtgtgtgcgcttagtaaagtactaatctcttgatcatttttcattaatcatcaatctccgaccatatggtgtactatatgcacttccaccaacaccgacagtagctgcaagtgcaagagtatgggggcatcctgttgcaattaggtttagcaatcttagagagcctctagtagagtcaccatatatgtgatcaccatcgtccatatggagcgcaatccatatggatatgaagatcgtggtgcctgtgcgcaaacacatattctgcatatcgcagtaatttttttcattttctcattcaaacactttgattccctccaaatttaaatgtttagcccatccagcacacatgtgcataatttttgataagttgca

SEQ ID NO: 8433 - DNA, 415 bp, Triticum aestivum
  Clone ID: LIB104-046-Q1-E1-C6
acgggttcagcaacctagaagacgaggctaggtaaaaaaggagagaagaaacattgtgtatggccaccgtgtaaacaataaggagcaccaaatgctgtgaacgacttgcgagcaatttgctttttgcttcaccggagtttgtgtagatgcgaattacgtttcaggaccccctcccccctttttttttgcgacagacagacagacagccttgttttttccccaggatttttacattgtttggtctccagcgccaggatgcacgccattattttttcaccatgtgtaccattatttgttgtataagaagactgagcaccggtggacatgttcataggaggaataagcacgatgtccatctacttgaacatcaataatgtctatatttatatttatatctattactgtatttgccatc

SEQ ID NO: 8434 - DNA, 409 bp, Triticum aestivum
  Clone ID: LIB104-046-Q1-E1-C7
gacggggaagaacacaaggcggagaagcgggcgccggcgaccaaggaggccggcggcgaggggaagacgaggggcaggaagaagggcagcaaggccaagaagggcgtggagacgtacaagatctacatcttcaaggcgctcaagcaggtgcacccggacatcggcatctcctccaaggccatgtccatcatgaactccttcatcaacgacatcttcgagaagctcgccggggagtccgccaagctcgcccgctacaacaagaagcccaccatcacgtcccgggagatccggacctccgtccgcctcgtcctccccggcgagctcgccaagcacgccgtctctgagggcaccaaggccgtcaccaagttcacctcatcctaggctagtctgccgtgtccgtgaactgatg

SEQ ID NO: 8435 - DNA, 436 bp, Triticum aestivum
  Clone ID: LIB104-046-Q1-E1-C8
cgggtggagctattagagtcatgctactgggtagttgtggattagtagaaatacttgtgttgaggtttgtgattcccgtagcatgcacgtatggtgaacagttatgtaaagaagtcggagcatgatttatttattgattgtcttccttatgagtggcggtcggggatgagcgatggtcttttcctaccaatctatccccctaggggcatgcgtagtagtactttgcttcgagggctaataaacttttgcaataagtatatgagttctttatgactaatgtgagtccatggattatacgcactctcacccttccatcattgctagcctcttcggtaccatgcattgccctttctcacctcgagagttggtgcaaacttcgccggtgcatccaaaccccgtgatacgatactctctatcacacattaacctcaataaa

SEQ ID NO: 8436 - DNA, 364 bp, Triticum aestivum
  Clone ID: LIB104-046-Q1-E1-C9
aagccaaggagagtcctatgcctgatgcttctgagctctttacaaatgtctacgtcaagggtttcggcgttgagtcatttggcgcagatagaaaggagttgagagctacactcccataggtcaccaacctgaagatgaagacgagtactcttctaacacgatgatatatcgaggaggaataagcattggtgaacaaacccttgggtgttgctggcagtatttgttgcaaaacgaacctgtatagagatgtgatgtcaggggaattcgttccttatttgttatgttttccttttttttctcttcctgcaattcagtttaactgctgctagctggcgatttggcctgcataatcgcttctgttcgc

SEQ ID NO: 8437 - DNA, 411 bp, Triticum aestivum
  Clone ID: LIB104-046-Q1-E1-D1
ttgttcatgctcactgaaactttgagaatcatgacaacattcaattttcactaacaacacttatcccattgtacaattccattgtataataaccctaatgtgccaatgtttgccttaaggatgtttacaatacatgatggtttgtgaggtgcatgacagaaacattggctgtactgcgcgatatttaactttttactggaatgtcaaaaggttctgacacattgtgcactgtctttctatataaattggataattttcctaatttttgcagaagttttcacgtaacataagtatggctaatgtccatattaatacagactgttctgttttagacagaatctgtatttgaagcatattctacctgttatgaggaaactatcaatttataacactggattaagccatgaaaaa

SEQ ID NO: 8438 - DNA, 415 bp, Triticum aestivum
  Clone ID: LIB104-046-Q1-E1-D10
attcccggaacgacgggctgacggaaatacttccgctactttgctgcatcatcccttcctcttcggggaaaaccaacgcagtgttcaagaggtagcagtgatttgctttcttatactaacggatcttacgagttttctgttctgaagttttcaaattttggttaaagattcgatggaccacggaataaggagtggcaagagcctaagcttggggatgcccaaggcaccccaaggtaatattcaaggacatccaagagcctaagcttggggaagccccggaaggcatcccctctttcatcttcgttcatcggtaaccttacttcgagatatatttttattcaccacatgatatgtgttttgcttggagcatcattttctttcataggatttgcttgctgatcatttagagtaatgt

SEQ ID NO: 8439 - DNA, 422 bp, Triticum aestivum
  Clone ID: LIB104-046-Q1-E1-D11
attcccgggacgacggggaggcagaaagggaggcggagatggcgcaccgggtggacaacgagtacgactacctcttcaagattgtgctcatccgggaatccggggtccggaagtccaacaacctcccctggctcaaccggaacgagttccggctcgagtccaagtccaacaaccgggtccaattccccaaccgggaccctccaaaattaaaaggaaaaactgtaaaggacagttttggacacggctggtcaggagagataccgtgcaattactagtgcatattacaggggtgctgttggagcactcctagtctttgacataacaaagaggcagaccttcgacaatgttcagaggtggctccgtgagctccgggatcatgcagatgccaacattgttgtcatgatggttgggaacaagtcaga

SEQ ID NO: 8440 - DNA, 398 bp, Triticum aestivum
  Clone ID: LIB104-046-Q1-E1-D12
cgggtggtgctaatagagtcatgctagtgggtagttgtggattagtagaaatacttgtgttgaggtttgtgattcccgtagcatgcacgtatggtgaacagttatgtaaagaagtcggagcatgatttatttattgattgtcttccttatgagtggcggtcggggatgagcgatggtcttttcctaccaatctatccccctaggggcatgcgtagtagtactttgcttcgagggctaataaacttttgcaataagtatatgagttctttatgactaatgtgagtccatggattatacgcactctcacccttccatcattgctagcctcttcggtaccatgcattgccctttctcacctcgagagttggtgcaaacttcgccggtgcatccaaaccccg

SEQ ID NO: 8441 - DNA, 424 bp, Triticum aestivum
  Clone ID: LIB104-046-Q1-E1-D4
gttagtaaaaagatggatcatctattttggaacggagggagtaataatgaatataaaaactaccatttggacctttgaacaagtggggttggaggttccgggaattttccaaggtaaccaataaccaaggacatggtccgccaaaacaaaccctcatcaaattttggtaacaggcctttattgagtagattacaacattgcacatcttttctgtgtggagttaactttatagttctgtaatacactagacttgctctggctaagtttctcccaatatatatggtagaatagcctactaaattttttaagcttagcacataaattaaagcacagttactgggtttgtataattgtaggcatggttaattgtgtggtgtacctctattttttggaatttgtgagtggcatactggcaaccaactgt

SEQ ID NO: 8442 - DNA, 427 bp, Triticum aestivum
  Clone ID: LIB104-046-Q1-E1-D5
gacgggagatgataacgacggtgatgctgtacacagtcatcatgtagaagatgcaggacatgatgatgatgccggcggagcagacgacgctggaccatcgatgggctgggtgcaggaccctcatattcaagagctgcttctcaagcagacgaataacgcaggagctgccgcccgagagaaagccaagatggatcaacttgagttagacgcggttactccattgtatgaaggatgcaggcccgaggatacccgcctgaaagtaacgctcatggctctggagatgaaggtaaaacacaaaatgaccgacgcatgcttcgacgagaacatgtcattctggcacgaacgtcttcccaaggggaacaagtgcccgactagtttggaggaggcaaagaaaatcgtgtgtcctctggatttaccgcacgttaaa

SEQ ID NO: 8443 - DNA, 383 bp, Triticum aestivum
  Clone ID: LIB104-046-Q1-E1-D6
gacgggtgaatcaaaaggagatgaaccggtgcacgctgacccataatcctctacccgccaaggtcaagatcattaatctaaggactggcttagcatctgccacttacagatactttgtgcaccaaaacacttatccttttgggccatccggtgccatgtcacacgcgagtttcagaacattgatctgccaatccatcgtgcatgttgatttgcataacactgttaaaccgctcgatctgacgtttgaatatctggcacttatactttatcatatcatcagattacgcagaccatacttttcatatttcctgcacatactcatctaacatgtgccctgtcatatttaccccagggagggggatgcgatgtacatatttccatgg

SEQ ID NO: 8444 - DNA, 341 bp, Triticum aestivum
  Clone ID: LIB104-046-Q1-E1-D7
cgggccgacgggttataggactgcgtttgatttttagtgccgcctcctcgaattgaggtagtagcctgcgctttgggtagtattttgttcggcgctcgagttcgtattcttcggctgctcgggccttagtctgtctgtctgtgagcagatcttggtcagcttggagctgctgctgcttcttttttaggcttcttgcagtggctgtaagcctgcgcttgaagcgctcctgctctatgggatcctctggtatgccaaatttgtcgccattgaggctcacctcgtcttcggagggaggcatatagttatcatcctccaagtatccgtccatcgcctgttcgtct

SEQ ID NO: 8445 - DNA, 379 bp, Triticum aestivum
  Clone ID: LIB104-046-Q1-E1-D8
acgggccaaacgatggagctcctctcgccgttaccgccgccgccggatgagaaccaggaagaggagaagaaggaggaacctgagccgccaaaacctgaacagaagaaagagccaacggtgatctccgtggtgcggaacgtgcacatgcactgcgaggcctgcgcgcaggcgataaagaataggatcgaaaacatgaatggagtgcaatctgcatacccggacctgaacgcgtctgaactgacggtgaatggcgtgtttgaagaggtcaagctgactgagtacatgcacaatcgcaccggcaggcatgcggccattatcaagtccgagccggttgccccggccgagaaggccggcgaaggcgacgccatcgatcaaaaga

SEQ ID NO: 8446 - DNA, 409 bp, Triticum aestivum
  Clone ID: LIB104-046-Q1-E1-D9
cgggtagggctaagaattaaaggacatgagtgttttgctttgtgtgatttgggtgctagtgtttccacgattccgaaaactttatgtgatattctaggtttccatgatcttgatgattgctctttaaatttgcaccttgcggattccaccattaaaaagccaatgggaaggatcaatgatgttcccattgttgtaaatagaaatttgatgcccgtagattttatcgttcttgatatagattacaatctttcttgccctattattcttggtaaacctttccttagaacgattggtggtattattgatatgaaggaagggaatattagatttcaatttccactaaagaaaggcatggagcactttccaagaaagaaagtcaaattaccttatgaatctatcatgcgagcta

SEQ ID NO: 8447 - DNA, 423 bp, Triticum aestivum
  Clone ID: LIB104-046-Q1-E1-E1
ggtcgagtacatgacactacaccattatttgggcctagaggaaggcattgggaagtaataagtagatgattggttgctagagtgacagaagcttaaaccctagtttatgcgttgcttcgtaaggggctgatttggatccacatgtttcatgctatggttaggtttaccttaatacttcttttgtagttgcggatgcttgcaataggggttaatcataagtgggatgctcgtccaagaaaggacagtacccaagcactggtccacccacatatcaaattatcaaagtaatgaacgcgaatcatatgagcgtgatgaaacctagcttgacgataattcccatgtgtcctcgggagcgttttccttcatataagaacttgtacaggattgtcctttgctacaaaaaagattgggccatcttgctgc

SEQ ID NO: 8448 - DNA, 396 bp, Triticum aestivum
  Clone ID: LIB104-046-Q1-E1-E2
acgtggaaactattggttcattatgtggatgttaggactcccgcaaagtcctgatggttttgcttccaatctccggctgaggttgaagaacgctccatgaagtgacagtgcaacatgtatcggccctagatatggattgggtctacgagtgtcgttcaaccttaacgtttgggctagattgtgctgtccggtttggttacatttttctgtccaagcagcctgatacggggctctgtttgtaggtgctcttagagcacctacaaccggaccccatacccgcctcaaatgttcgtgctggctgccatatcagtgctcagacgaaaaaaagcaacccaaccgggcgtcccgtattcggtccaaatgcccggactgactatcaaccccagcatccagctc

SEQ ID NO: 8449 - DNA, 402 bp, Triticum aestivum
  Clone ID: LIB104-046-Q1-E1-E3
ttgttcttgttagaggcagcaccaagattcccaaggtccagcaactcctcaaggactacttttaccggaaaggaccaaacaagggtgttaaacctgatgaaggtgttgccttccgaactgcaattcaaggaaacaaccttaaccggcaaggccgttaccaaaacaaaggtaacctcctcctccaatttgggccccttaaccttcggtaccaaaactgttggaggattcatgacaaacctgttcccaaggaacactgtcatccccacaaagaagtcgcaggttttcaccacctaccaggaccagcagaccaccgtctctatccaggtctttgagggggagcgcagcatgaccaaggactgccgtcttctcggcaagttcgacctttctggcattcccccagct

SEQ ID NO: 8450 - DNA, 415 bp, Triticum aestivum
  Clone ID: LIB104-046-Q1-E1-E5
acggggcacaccaccgtgcctgagtaattccattgtaggcttactggacggtgatgggttgtatgagatttatcatgtaatcgaattagttttgttagggtttgatccctagtatccactatcttctgagattgatgttgctatgactttgctatgcttaatgcttgtcactagggcccgagtgccatgatttcagatctgaacctattatgttttcatcaatatatgagagttcttgatcctatcttgcaagtctatagtcacctattatgtgttatgatccgttaacccccaaagtgacaataatcgggatacttaccggtgatgaccatagtttgaggagttcatgtattcactatgtgctaatgctttgttccggtactctattaaaaggaggccttaatatcccataatt

SEQ ID NO: 8451 - DNA, 427 bp, Triticum aestivum
  Clone ID: LIB104-046-Q1-E1-E6
gggtcgacggggtatggtatcaacacctatgttttctttgggtcaaagttaccgtggtgtttgtgcataagttatcacacccgtggtgtgtatttcaccttgccatttagacaaaagttaattgcggtatattttcaacaactttttcctaagtcaaaagttagcacggtgtttgtatgtgagttatcaactttgtggtgtgtaaaatatcatggtatttacatagaggttaccagggatatgttttcaacaacaaacaatcccgggtcaaaagttttcacagtgtttgtgagtgtgttatcagctttgtggtgtattaccatgatatttacacataaactaccgaaggtatgttttcaacgatttttttcagtatgctcctctctcttatatttaggaacagggggtgtacaaaacagaagcaacg

SEQ ID NO: 8452 - DNA, 422 bp, Triticum aestivum
  Clone ID: LIB104-046-Q1-E1-E7
cggggcatgggaggacgtgccgcccatgcgccacgccatcgtcgtcaacatcggcgaccagctggaggtgatcaccaacgggcggtacgagagcgtgatgcaccgcgtgctcacccgccacgacggcaaccgcatgtccatcgcctccttctacaaccccggcgccgacgccgtcatattcccggccccggcgctcgtgggcgctgccgacgctgctgagaggaacgagggcgaggagggcaccgccgtatacccaaggttcgtgttcgaggactacatgaacctgtacgtgcgccacaagttcgaggccaaggagccacggttcaaggccatgaaggcagacgccgcgcccatcgccaccgcgtgataactgatacgcgcccggacccggacgagagtattgtgagacgtgttttaatttc

SEQ ID NO: 8453 - DNA, 170 bp, Triticum aestivum
  Clone ID: LIB104-046-Q1-E1-E8
acggggtaatgcaccatgtgtcactcattctacacgccatcttctgcaacgtctgcgactatctgcaagttatcacgtgctggccgtactacagtgtgatttacacgtgttctaactgctgtattgtatcatcatgttcatcgtctctttctacatgccaggcgcttact

SEQ ID NO: 8454 - DNA, 412 bp, Triticum aestivum
  Clone ID: LIB104-046-Q1-E1-F1
ggtcgaggcggactcccaatgtgagtggtgacatcggtgaatcgaagaaatatgtcatccatccccagggagggatgacgatcccatttggaggggaaaagcccactcccgaaagatggtcatggattgatccatctgtcttcaagctaaggagtgaaacattcctcagagataagaagaaatgtccagctccgaactatgccgcgtactacccaataggtgttgacttgtttgcaagccccaagaaggtttcgcacatcgccgaacacattgatcttccacaagtcaaatcacacgacaagctcccatcacttttgatcgtcaacatccagatgcctacctatcctgctgctatgttcctcggggacagcgatggagaagggttcagcctttgtttgtacttcaaaatctc

SEQ ID NO: 8455 - DNA, 420 bp, Triticum aestivum
  Clone ID: LIB104-046-Q1-E1-F10
attcccgggtagacggggtggctttattgcattatgagtcaacatgaatgtaactatttgacctaacataaactcaggatgtaacaatgtagaaaatagctgggtgaaaaacaacttattctgctccctcggtgttgaatagggtgcatagggtactaaatttgccccaagttttgttcaaccgaggaaagttggacttgttagttctcacaattgagcaagttttctaatactccctctgttccatattagttgtagttgatttagtacaaagtttatactaaatcagcgacaactaattatgaatggaggggtaatatgtttttgcacaccgaaggacgttcctaacataaagttttctaatataaagatgttccgaatttaaaactatccatgaattttgaaaactgttcatttttt

SEQ ID NO: 8456 - DNA, 346 bp, Triticum aestivum
  Clone ID: LIB104-046-Q1-E1-F2
tggcgcaatgtagtggagcgataaaccaaccaacccagggggctttcttcaaaccggtgggccttccgttccaaggcaatgggcctgaattcggaggcgctcgcaaaggcttccttggacatggacaaaaaggtggtggtcaacttctacccgcggtgccccaagccggacctcaccctgggtctcaagcgtcacaccgaccccggcaccatcaccctcctcctccaggacctcgtcggcggcctccaggccacccgcgacggcggcaagacctggatcaccgtccagcccatctccggcgcattcgtcgtcaacctcggcgaccacggccacttcctgagcaatg

SEQ ID NO: 8457 - DNA, 403 bp, Triticum aestivum
  unsure at all n locations
  Clone ID: LIB104-046-Q1-E1-F3
gggtcgaggggctgcaatgataaatgggggcattgctgatgtcaacaatgctgatggagctggagctgtgaatggtgctgtgcctattttggttgaccatgctgatgtggagagcgagaatcctgagaacactgtagtgcctgagcaggtggatgagtatgtagatattgatgacgagatgccaaccgcaacttaccgatcagtggagatcgagaagggcgctgaggccacgagtgtctctggtggttcgggaagtggttcttcatcatccagtggttcagggtcagggagctcaggggacagcgcctcagaagctggcgatgctcgttctcttgtttagaggaggttgttctaacagtaggatttgagtangtggaggatgtgagtacttaattctgggatg

SEQ ID NO: 8458 - DNA, 168 bp, Triticum aestivum
  Clone ID: LIB104-046-Q1-E1-F4
atggtcaacttaagtgctgagtagaacaatttaaaagttggcaaaagatttaacttcccgaataaatgccccctggtcctcaattcggggcttttccccggggaaaacaattacgttaatgacttacggtttaacaaaaacttccccgggaaattcaagatttctcca

SEQ ID NO: 8459 - DNA, 354 bp, Triticum aestivum
  Clone ID: LIB104-046-Q1-E1-F7
cgggtcgacgggcaaacacatactcagaggatataagtgaagcacatgagtaaatgacaaactactccaaaacgatataggtgaagatcaatgagtagttaaataattatgtaactacgtgaagactctctctcattaccgaatttcagatcttggtattgtattcacacagcaggcaaagcaaaacaaaatggcattgcacggatagcacaacacatgtgaagaagcagaaacttaggttcaaccgatactaatcgatagttgttgaagaagaaaggtgggacgcctagcggggcatcccgatgccttagatgcttgagacttcttgaactactgtcatggggtgccttgggc

SEQ ID NO: 8460 - DNA, 362 bp, Triticum aestivum
  Clone ID: LIB104-046-Q1-E1-F8
acggggaaattcgctgtctaagatgacggttgagctgctgacgctggggtctacctctgcggaagatgtgcaactcatgatggttgtcatgaactcgcacggagattgcatcaaccatgtcaacagttcaactccttctgcatagccaacttcgggctcatgatagacgtcgccaaggacttcagaatcatctcaattcaccgcatctttcagatccaggagcagatgaatctagatacggctacgtgaaacatattcagtcaccgacctagccagggctcgatgcattctcagcttcagctggacgcaggcccaaactctgtgtgagtactctatttgcaaccaatagtcatcaatgatga

SEQ ID NO: 8461 - DNA, 388 bp, Triticum aestivum
  unsure at all n locations
  Clone ID: LIB104-046-Q1-E1-G1
gggtcgacgggaagcgaggtgagtcatggtcagaagaggagcacaaaaaatttctacttggattgaacaaattaggaaaaggtgattggcgtggcatatcccgtaattatgttgtctcgaggacacctactcaagttgctagccatgctcagaagtatttcattcgccaaacaaatgttaataggagaaagagaagatcaagcctcttcgatatggttattgaggatcctggtgaccagccactctcccgttcatcgtcacaagagatgccgctctcccgttcatcttcacaagatgtagaagagttcgtagatgatctacggcctgttactgctcctgtgacnacacccgctcctatgcccgtgataacatctgtttctgtccacca

SEQ ID NO: 8462 - DNA, 423 bp, Triticum aestivum
  Clone ID: LIB104-046-Q1-E1-G10
tcccgggtagacgggcagctggatagtcatctatacccatttatgtgtcaaatagatcatagggtttctcaagttactcctgccccccctttttggaatagaactccaatggttatgttctcccaatccatgaaatctgagtaagtttcgttagatccgtgtagtgtattgatgttttgaatggtacaggtgataagagattagttgtttcatatgtgcaaatgatttcttctagtaattcgactagggtcagtgttcgtgctaataattcctagccagggcttgacaattgattttgaatgacctaaatatgtttgtgccattattttcttcaagattggtctatacatagacgactgtgcttaaaaatagaaccataatatctggatatgtataaataaaagccataaattcctaatccta

SEQ ID NO: 8463 - DNA, 320 bp, Triticum aestivum
  Clone ID: LIB104-046-Q1-E1-G2
cccggcccggggcccaaccggtgcccaaggtcaaggaccggattctcaaggccgaaggcttccgcaaacggcaattcaagttaccaaaggccggcttaacatggccggccttccttgaaaccaagtttaccttcatgcatgcacggtgtggtgtgcccgtttccttcaacttttgtacaaaatcatgcatcagggcgtacataccgtatggcatacatacatacatagagcgagaaatatagtagagagcttcgtggtacattattggttttattacggcactcatctctggtttgctggtgtatggactcaggaggagg

SEQ ID NO: 8464 - DNA, 326 bp, Triticum aestivum
  Clone ID: LIB104-046-Q1-E1-G4
aagggtcaaccaagggaaaatgcaatacctccaagggtccaaaggaaaaccctaagtgattaacctggtcccgccccaccaccaaggcaactcctggaacccgggccaataaaacggctttggcccaaatttggaataagcaaccccccggtccggaacccttggaccaaatccgggaaattggcgcaatcaaccaattcaaagccaacatcgtgtaccttgcctgcggcgacaaaattcttggcgtcgatgtggttactaagaagataactaggatttctggtctagctatagctgtgccagatctccccctactaccatgtgtg

SEQ ID NO: 8465 - DNA, 404 bp, Triticum aestivum
  Clone ID: LIB104-046-Q1-E1-G5
ggtcgacggggatgttcatcttccgcaacaagcacatcatgattgatctcgggacaggaaacaacaacaagatcaactgggcaatgaaagacaagcaagagtttgttgacattgtggagaccgtctacagaggagctcgtaagagccgtggtctggtgattgctcccaaggattactccaccaagtaccgttactgaggtatctgtgcctggctattcatgtgcagtgtgtggcctgctctgttctgtgaaatgagctgtgtgacccttgatgtaatgtctgtcaactttgaaagtgtcgcgtaactatgtatttgtatcttaaatacatgtcataaacctgtaaccctttgaaacaggacctgctgtctattggtattactgattaaagtgatatttggtttg

SEQ ID NO: 8466 - DNA, 396 bp, Triticum aestivum
  Clone ID: LIB104-046-Q1-E1-G8
cggggataagcacctcgccgtcgggggagaacatgcgctacttcaatgtcatggtccttggccccgcgcagtcgccctacgaaggtggagtcttcaagcttgaacttttcttacccgaggaatatccgatggctgctcctaaagttaggtttctcacagaaatataccatcccaacattgacaagcttggtagaatatgcctcgacatcctaaaggacaagtggagtccagctcttcagatacgcactgttcttcttagcattcaggcactgctgagcgccccaaacccagatgatcccctctcagaaaacgtcgcaaaacactggaaatccaatgaagctgaagctgttgagacagcgaacgaatggactcgtaagtatgccaatggtgcatgac

SEQ ID NO: 8467 - DNA, 384 bp, Triticum aestivum
  Clone ID: LIB104-046-Q1-E1-H1
gggtcgacgggtattatccagtgatgtttaatacagttacaacaccaccgtgacacatagtatccgttatgtgttcgtgacgatatgatcatacgctttgagtgcaaagatgaaattttttgctgttggcaatggacatacttgtgatagcaatcaccctcatatgcctctcatgcctaccgggaaagatccgggaaagtctctttcttgggtagacacgagcttgtccctcgtcgagacggttacgaccggcggggcagggggaggtatgatgagtggtggttgtgtctgatggatgtgagatattatccttgagctaatcatgcaggaaatacttaagcctcctgagtcggccgtagatcgaatcctgttccagtaaccccc

SEQ ID NO: 8468 - DNA, 422 bp, Triticum aestivum
  Clone ID: LIB104-046-Q1-E1-H10
taccggtgtagacgggagagtcttaagtagcatggaaatttgcttaaaatcctaatatgctaggtattcaagaataataaaattctcttaagagtgtgttgaatactatgagaaatttgatacttgataattgttttgagatatggagatggtgatattagagtcatgctagttgagtagttgtgaatttgagagatacttgtgttgaagtttgtgattcctgtagcatgcacgtatggtgaaccgttatgtgatgaagtcggagcatgatttatttattgattgccttccttatgagtggcggtcggggacgagcaatggtcttttcctaccaatctatccccctaggagcatgcgcgtagtactttgtttcgataactaaaagatttttgcaataagtatgtgagttctttatgactaat

SEQ ID NO: 8469 - DNA, 402 bp, Triticum aestivum
  unsure at all n locations
  Clone ID: LIB104-046-Q1-E1-H11
attcccgggaccacggggggacaaaagtgtggcgccagagtagccgcctcgccaaccgcgtatcattaatgtgggcggtagacggatggacggacggtacttctgtcatttgaaggcggagcaatcacctgcactangaagcgcgacgggcgacgctgaccgtttcgggcggaaagcacgcacaagcgagggaggaggtctgggtgggccagggcagtcagactcgtgcttggcaacgggtcggtccagcagccggacatgctggctcgccagcaagctcgcctagctgagcgacgacaatcagatgatggacgtagcttccaaccaggagccggcgccactgtccaagccggttcatgccatgttcaccatagagcaagtgcggctgcacttcgacgccct

SEQ ID NO: 8470 - DNA, 399 bp, Triticum aestivum
  Clone ID: LIB104-046-Q1-E1-H12
attcccaggtcgacggactgggtcaccacgcgcgagaatactccgagggttcactggttcggctgcggtgtgaggctgccgtcgccgcagggcctggctagcggtgggaatagtaggggcggtgaggcctctgcggcagcacagccggccataggaggcaggagcatgcggcacgaccaacgctgctttgggcggctggagcaagaagaccaagaagcactacggccattggatggacatcgtacggtcactggagctagaatcgttcatattgactaagttgacaaagccctccgtctccgtcaacttagtaggcccacaagtcagcctcccaccatgctgggtcccagctagcaggggggtattcatttttttgtgcgtaataaggaggcacttcct

SEQ ID NO: 8471 - DNA, 383 bp, Triticum aestivum
  Clone ID: LIB104-046-Q1-E1-H3
cgggtcgacgggaacggctacatgcaagtctgatcgattcgaagcaggttgagttcagttcagctagaggaagacgaaggcgcttcgatcagtccgatctcctgctccttttacatgatgattactattatcttaatcttagtgcatgtgtatgtaatatgcaccatgaattggtagtgcagtgcagtgcagcacagcacatctctgaacctgggaaggtactactagctttcttttcactcagacaagtcgggagggggtttcttgtcagttagtcggtttctggcttgtcagtagctgtggtgcgtgtcgtgtggatcgagttagttgtactaccagaaattcggaatgacatggaacccatgcatagcatagccgatgac

SEQ ID NO: 8472 - DNA, 390 bp, Triticum aestivum
  Clone ID: LIB104-046-Q1-E1-H4
tacacttaaaaacgctcatcgatttgaaggcccgcacagtatccttaaacggcaacctaaaatttacatcaccgaccgacaaataaaaaattgatggccattgataaggccctggtttgatcccttcggtaaactaccactgacctgcaagccattaaataccgtttgtgatgacaaagtcattactaaccctgatgggtcattcgcgcatcagtgatgatacaatttggccgatcagtgctattcgggtctgcagtagtggtaaacaagctaggattagatataaccgaatatacatggagacgaagatgtatcccgatgttctcttccttggaggagaactagtcaccgctagagaggtgggaattcatggatacggtccaaatatgt

SEQ ID NO: 8473 - DNA, 410 bp, Triticum aestivum
  Clone ID: LIB104-046-Q1-E1-H6
ctaaaacactgcagaatgttcattcgtgcgagaattggctgccaaggtgggtgatgagcgcgtggcgcgtcgcggggatcgttcatgcgttggagggatgggacgagcacgagtgcggggacatggtgctcgacatggacaaagtttggtctgccgcacttctgcacgggtttcgccccgttgctgaggcttgatcgtctggttgcaagtcgagtgaataagcgttacgcagataaggtcatatgctcgctgaagggccatgctgaggaagaagaagcagacttattggctagcagatgagtggcctataattaattaagtactactactagtttgatctactactaccaaggttacttggttagctattactactgcattattcatctcctacgataatgaggtaatga

SEQ ID NO: 8474 - DNA, 418 bp, Triticum aestivum
  Clone ID: LIB104-046-Q1-E1-H9
attcccgggacgacggggcagacgtactacgcctgaaaccgggtcactgggccgccggtcatcatcagccccatcatcagctatcaacttcatcgtcaaggatctcagaccctgaggctcactcaattaacgattgcggtcggttctaacctttactctgaatgcgatgcctgttgcgaaatctacctatatgtgctggctttactctcaaagctatttggtctatcacagtaactaaatcaacactaatgtgtacggcagcgttggatagattctcgctcagatctaacacaatcatgaaactgaatcatatttgctcttgaactttttgtcacccatcgtttgcataaacatatgtatacttttcaatttgtacttgtccggacaagcggcaaccgtgccgcccgccatgcaaatc

SEQ ID NO: 8475 - DNA, 400 bp, Triticum aestivum
  Clone ID: LIB104-047-Q1-E1-A11
gggtcgaggaagtgaagctcttcctcaccggcgtcgatgaaggtaacgatggcgctagggcttgagagctcgagcgaggggagtgagatcgagcggggtaaatgcagtctgaggagggtgaggggtatttaaagccgaggtgaaaaaccgctcgcccaaggaaaatggacgaacgtgcccctgacccttctcatcctagcgacatgtggcacccacgtacagtgtggtgcaaatcgtgtgagatcgtgggtgactagataactcttatcgtgggatgtgggacattttgagcggcaaaagccgaaaattcggataagaatattttaatgtttcgttctcaaattcttcagctgacaaggatacagtgatgattttgaacgagtttcaaatagaacgcaca

SEQ ID NO: 8476 - DNA, 357 bp, Triticum aestivum
  unsure at all n locations
  Clone ID: LIB104-047-Q1-E1-A4
cgggacggctaaaaccccagctcaagtgcctacaaggtcatcatcgacttggtcgtcgaaaaatacttcagatagaatgaactagcagctaactatgagtggtagaggaccaanggggaaaggaggaaaaataaaaggaagaacgcaggattttgaccaacaatcagtaaggggttgacacgtgtcgcaaaaataaaaggaggaaaaatctgggactgaccaacaatcagtccacagattttgttttcagtttaggtcgaattttttgcccaataaggggttgacacgtgtcgctgatatttgagctgctgtatgcaacaaattcgacggattcgttcgaaagttgcctggacggcc

SEQ ID NO: 8477 - DNA, 285 bp, Triticum aestivum
  Clone ID: LIB104-047-Q1-E1-A5
ggtgtccatgggcgaggacgtgctgacgctggtggtggagcccaacgtggaccactcgctcatcatggggctccttgtggtgcatggcctcataaaccactccatgtgagcatcgcatcgtacgtgcagggacagggtgtaattttcttgttagatgcatgctcagatgcatctatcctgcagaccagtcttcttctttctttctttccttggaaaaccttttgtggcgtgatttgtttaagccttaggtctgccaatcaatttagcaagaataagtttatgttc

SEQ ID NO: 8478 - DNA, 257 bp, Triticum aestivum
  Clone ID: LIB104-047-Q1-E1-A6
ggggtgtccatgtgctagcgttcttcgctgtcggtggtgccatcgtggtactcactcatcatggggctccttgtggtgcatggcctcatctgcactccatgtgaacatcgcatcttacgtgcatggacagggtgttattttcttgttagatggatgctcagatgcatctatcctgcagaggaatcttcttctttctttcattctttgggataccttttgtggcgtgatttatttaggcttcaggtctgccagtcaat

SEQ ID NO: 8479 - DNA, 391 bp, Triticum aestivum
  Clone ID: LIB104-047-Q1-E1-A7
ccgggccgacgcttcgatttacgtgcgccgggcaaatacgaatggtccatgctttttttgcaagggatttttacatctgtgctcctggttccttagctctactcattcatccccgcgctctaaattttggccaattttccccaatcccttgccagaaaccctcataactgggcacaacgaacattgccgtcgggtcataggcttgaccgttaactctgactagtggggccacgctggactgtgttgtccgttcaacctgacaagtggggctgcgctgggtggtgtcgctgtttgaccgttgggccgtggtttcgttgggccgtcccttgcattaaacgtctgcgcgcactaccaggacaaaagcctgctatgcatgcacccagcaaaccct

SEQ ID NO: 8480 - DNA, 380 bp, Triticum aestivum
  Clone ID: LIB104-047-Q1-E1-A9
ggctgaccactgggcgccggcgaacaccaacaggcgcacctgaagcgaagcccgaggcaggcctcgacggcggcgatggccgcactgcgtggcaggggtagaattccggtgcaagcgcgcgcatgcgcatggctgacccaattcggtcaatctcctaacacaatcgtttcgtttcgtttcgtttccgtgaacctcaatcagcagaccctgtgctggcgccggtagtatgtaatgtgtaatcgtcgtgtatagcgagacgacgcaccgccgatcgatcgatcgtggtcgagtcgttgcgtcagtgactatgtgcatgtggtttaacatggtagcgacctgttgctgtcgccgactaatcatcaaaatcagcagttccattc

SEQ ID NO: 8481 - DNA, 398 bp, Triticum aestivum
  Clone ID: LIB104-047-Q1-E1-B1
aattcgcgagccgattgaatttttacagatactcagccacatattgatttccttggacaagcgcgagaaattcacgctgcttggccttcataactccagtagggatgtgatatttgcggaacttatccttgaatttttcccaggtgacttcctcattaatcggccacatggcttttgtattttcctaccatatggcagctgcgccttcaaggtaatgggttgcaaatgggactttatcatttccttcagtacgggcgatctcaagctttttctccatggtgcgcaaccaatcgtctgcatccaatgggtcagcaacctgactgaaattgggtggattggtcctctgaaaatctgacagctttgagtgatgaccattctgatttccattttgtccaact

SEQ ID NO: 8482 - DNA, 409 bp, Triticum aestivum
  unsure at all n locations
  Clone ID: LIB104-047-Q1-E1-B10
ggtctacaattcccgggccgacgggattaaaaagtaatatgaatattttccttttgggggcataaggtgcaactcttcaactgtgtaaatattcaagtttggtcacaataccttgtcagtatcaaccagaactgtcaaatgtgaggttgaaggcttgtcatgcctcgccacattagcacctggcagatcagaaggtttattcgtgctttgattctggtaagcacgatgggaggaaccaatagctggacttgcagaagggacagtccgagaagccattgtatttccagacatttgatgtgtatcttttatgctagtattagcaggcctactagcancagatgtgccagtactgaatacaggaggctccaaagaaacggctgatcacaaatctgtggtgtgctgaaaatat

SEQ ID NO: 8483 - DNA, 396 bp, Triticum aestivum
  Clone ID: LIB104-047-Q1-E1-B2
attcccgggacgacgggaaggcagaataaaactttaatggaagctcctacattcaacacattctgggaaaaggatgttgcagagtctgtgcgccagggagatgcgcagccatttgtcgaggaagctgtgctgcaagtatctgattggggtttcagcttgtcagatattcaaatgcagaagaaagaggatcagggagtatttgaatttatgaagtctctgttcagtcaggctgaacgagagtgggcgggatttctgggcccaatccacatttggcagggaatggatgaccgggtggtgcccccgtcggtgaccgagtttgccaggaggatggttccaggagccactgtccacaagcttctcgacgaaggccacttctcatacttctgtttctgcgac

SEQ ID NO: 8484 - DNA, 402 bp, Triticum aestivum
  Clone ID: LIB104-047-Q1-E1-B3
cgggagggcctatggtttttgaagacttctaaatttttgcaacaagtgcatgagttcttttgattaatgttgagtccatggattatacgcaccctttcacccttccattattgctagcctctcttgtgccgcgcaacttcaccggtaccatacacccaccatatatcttcctcaaaacagccaccatacctacctatcatggcatttccatagccattccgagatatattgccatgcaactttccaccgttccattcatatgacatacattacttttgtcatattgctttttgcatgaacatgtagttgacattgtatttgtggcaaggccaccttcataatttccatacatgtcaatcttgattcattgcatatcccggtacaccgccggaggcattcata

SEQ ID NO: 8485 - DNA, 408 bp, Triticum aestivum
  Clone ID: LIB104-047-Q1-E1-B4
attcccgggacgacggggcgacggaggcgatggacagccggccgttcggcggcggcgagagcaagctcaaggcggaggcgacgacggacaacaaggggtggtacaagatcgagatcgatcaggaccaccaggacgagatctgcgaggtggtgctgaccaagagccccgacgcgtcgtgcgccgagatcgaggagttccgcgaccgcgcgcgcgtcccgctcaccagcaacaacggcatgaagcagcagggcacccgcttcgccaaccccatcgccttcttccccaaggagccgcgcaaggagtgcggcggcatcctccaggcttacgacctcaaggacgcacccgagaacccatgaacccccatcccatccatatagtctcgctcagttgcttcccatcatcatcatc

SEQ ID NO: 8486 - DNA, 402 bp, Triticum aestivum
  Clone ID: LIB104-047-Q1-E1-B5
ttcccggttcgacggggaaaaaaaaaaaaaaaaaaaaaaaaaaaaaaaaaaaaaaagaaaaaaaaaaaaaaaaaaaaaaaaaaaaaaaaccaaaaaaaaaagaaaaaaaaaaaaaataaaaaaaagaaaaaaatgaaaaaaaaaagaggaaagttaaaaaaataaaaataaaaaaaagggggcgtttcaaggggttcaagttttatttccgggttatgggaatttaaaacctttttaaagggtccccaaattttaatttaagggggttttttttaaaaggttgtatgggggaaaaccctgggttttcccaattttaccccttttgaaaaaatcccctttttccaaatggggtttattactaagggggccgaaaggtttgccctttccaagattttgccaacc

SEQ ID NO: 8487 - DNA, 336 bp, Triticum aestivum
  Clone ID: LIB104-047-Q1-E1-C1
acggggagcacaaaaaggcggagaagcacaagaagaaggacggggagcacaagaaggacggcgagcacaaggagggcatgatggagaagatcaaggacaagatcagcggcgacggcaagaaggacggcgaccacaaggagaagaaggacaagaagaagaagaaggacaagaagcacggcgagggccacaaggacgacgacggccacggcagcagcagcagcgacagcgacagcgactgacccagctccggcccgcgctccggaaccgttgcagtgtaggcaaaatcaatgatgaacacttggaaaaagtgtgacagacatatatgttgcagggttt

SEQ ID NO: 8488 - DNA, 418 bp, Triticum aestivum
  Clone ID: LIB104-047-Q1-E1-C6
tacggtcgacaattcccggttcgacgggtgtgtgaactcgttctccaccttgcaggctccgtcgtggtgctcccacttctttcgtgtcactccgggtgaaaacttgatcttcaagatcagacggtcacggcttcctatggtcgtatccttcctggtcgtcttggagtcctcgcttcggccgtatccttggtggattgctcatctacatggtggtctccagcttatcatcagggtgcttggtcgtcgttggggtggtcttttcagtgcccggccatcttcatggtgtgtgcattgagtgtggtggtggagtgcgtttgtatcttcttactcgaatgttgtggtgatggttgctttatatataaagcagggaacccctttttcgccaaaaaaaaaaaaaaaagctaaaaaaagaaaaagc

SEQ ID NO: 8489 - DNA, 77 bp, Triticum aestivum
  Clone ID: LIB104-047-Q1-E1-C7
tccgggccgaagggtgtgttaactcgttctcgacctttcacgctccgtcgtgttcgtctctgatcgtacttgtctct

SEQ ID NO: 8490 - DNA, 407 bp, Triticum aestivum
  Clone ID: LIB104-047-Q1-E1-C8
ttccgggccgacgggcgcgcccaagcggcccttggcggcggctgccgcccccggcgacatgggatgccagctctcctgcgccaggacttcctgccaccgtcttgatccaggtaatcagattggcacagttcatgtgcgccatgaattagtaatgcgcaaccactgcactcacgtatgatgagccgacaacgacgatgtggtggtaaactctttttgcagaccgcgaggccgctgaggcctgcttcgggcagtgctatgacggctgcaagaccaagactccctgccgaggcctctccgcgccggcgccgggatgcccaccacgttaggcccggtggtcgccgaccttccttcatccgagccggacccggatgatgcggtccgtgcgtcgtcagaggcgcccgaacatc

SEQ ID NO: 8491 - DNA, 390 bp, Triticum aestivum
  Clone ID: LIB104-047-Q1-E1-D3
attcccgggacgacgggcaggcaaatgctcttgacacaaggatacctttggtttcattcacaggaagtacaaaggtaggtcaaatggttcagcaacaggttagcgcgagatttggtaaatgccttcttgaacttagtgggaacaacgccattattgtcatggatgatgcagacattccgctagctgtgcgttctgttctgtttgctgctgttggcacagcaggacagcgatgcactacatgtcgtaggctgcttcttcacgaaagcatatatcaaacatttcttgatcaacttgttgaggtttataaacaagtccgtattggggatcctatggaaaagggaccttgctggaccaacggcaactactacatcaaaaggaaagctttttgaa

SEQ ID NO: 8492 - DNA, 411 bp, Triticum aestivum
  Clone ID: LIB104-047-Q1-E1-D4
cggggtggctcaggcggcgctagggtttcgggtgctcgggtgctacggctcgggcctccgcggctttaaagggttggccgggctaatgttccaggcggacacggcccggttaggtctgttgacttttttaaaaataaaaaataattccacttagaaaaacaaagaaaagaaatactaaacggactccaaaaatcctgaaataaattttccccttcctctaaaaatctaacggacaaggtgaacatttatttgggcctctaatgcaaattttgaaaaacgcatattattcctaattcaaataaaatagcgataaaaactccgaataaaatcttatttgattttaatattaaatctccaatatttcttgactttggggaagtcattttatcccctcccttttaatttcaaaaa

SEQ ID NO: 8493 - DNA, 417 bp, Triticum aestivum
  Clone ID: LIB104-047-Q1-E1-D7
gagaggaaaaaaatatttttcttaaatgaatctagtcaaaccaaaatattgatttaacccgaatcggatgatttttggagtctgtatttattggtggaaaagaggcttagagtcaaaggctaggcaatgtgggactaaacgtagacaaaaatatatgaaacagagaagaaaagaggcggatgggcctaaaggccttcggcccgccgcgcgcacgctgcagctgcagttttttttaaacaaaattcggcctaaaaatgaaaaggctggctaggcctggctcatttaagagaggaaaaaaacaatggggcgccagaagctactatactgcgcatgtaggcgacaaataaatatgggccgcacgtacatttttttaaatagaaacagaaggaaaaccgaatagcaaagattaaataaaaa

SEQ ID NO: 8494 - DNA, 378 bp, Triticum aestivum
  Clone ID: LIB104-047-Q1-E1-E3
cggggtgacaaattgtaaataaaattgttgtatcgcgacctgaatgaatgaaataaacgaaataacgctcttgttcaaccgtcaaaaaaaaaaaaaaaaaaaaaaaaaaaaaaaaaaaaaaaaaaaaaaaaaaaaaaaaaaaaaaaaaaaaaaaaaaaaaaaaaaaaaaaaaaaaaaaaaaaaaaaaaaaaaaaaaaaaaaaaaaaaaaaaaaaggggcccccaaaaagattaaaactaaatatccgggaaaaggaaattaaaaacccctaaaaaggggacacaaaattaaattaaaggggcgacttttaaaaaaattcaaacgggaaaaacccgggggtaaacaaaataaaaccccttaaaaaaaaaccccttttcc

SEQ ID NO: 8495 - DNA, 361 bp, Triticum aestivum
  Clone ID: LIB104-047-Q1-E1-E4
attcccgggacgacgggggcgccaaaaactgtcagcctgaggagcaagtctgattgattgatggatggttcatcaaggtgagctatatttgtagggcttgttatacagagactgtattaccactgccagaatacactagttagcaggtacaccagttccagctgagctgctgagcaaagctcatcatactactatacattttcttcatctacagggttgtttcatgggtgatgggctgacatgttgttggtgggcattcttgtactttttttttggaccagattctttgatgtattttttcaaaaaaaaaaaaaaaaccaaaaaaaaaaaaaaaaacaataaaaggaaaaaaaacacaaaa

SEQ ID NO: 8496 - DNA, 431 bp, Triticum aestivum
  Clone ID: LIB104-047-Q1-E1-F10
attcccggttcgacggggtggtgtagtgtgggtgatgctgcgctctgacgaaacatctgtgacggtgttactggcaatgaatttataggattttttccctcttcacctttgagttagtaacctttctccccaaaaaaaaaaaaaaagaaaaaaaaaaaaaaaaaaaaaaaaaaaaaaaaaaaaaaaaaaaaaaaaaaaaaaaaaaaggagcaaaacaaaaggaataaaagctaacaacaaaataaaagcaacgtcaaagtccctgaaacgtagtcaaccaaattcaattcatcgagaagtcgttaaagaaaatacagagaggtaaaaccctgtagtcacccagtataacagcattgtaacaaaacccggtgtcaaaagcaagaggaatacccaaaaggcccgtaccaatagcggtgcacaagaattgggca

SEQ ID NO: 8497 - DNA, 418 bp, Triticum aestivum
  Clone ID: LIB104-047-Q1-E1-F2
attcccggaacgacgggggaacgatgagatcatggataggggaacttttgccaacattcgcattgtgaacaagttcttgaagggagaggttggccccaaaaccgtccatgttccatcaggggagaagcttgctgtttttgatgctgctatgaaatacaagaatgaagggcatgacactatcatcctggctggtgctgagtatggcagtggaagctcaagggattgggctgcaaagggtccaatgcttcagggagtgaaggccgtgatagccaagagttttgagaggattcaccgtagcaatcttgctggaatgggcatcgtccctctatgcttcaaggctggggaggatgccgacagtcttggcttaactggccatgagcgttacaccatccagcttccgactgatgtgaatgaaatc

SEQ ID NO: 8498 - DNA, 392 bp, Triticum aestivum
  Clone ID: LIB104-047-Q1-E1-F4
gacgggaagccaaaatgatgtaaaatagacccgtggccataggtttcactagtggcttctctcaagatagcatatattatggtgggtgaacaaattactgccgagcaattgatagaaaagcgcatagttatgatgatatctaggcatgatcatgaacataggcatcacgtccgtgtcaagtagaccgaaacgattctgcatctactactattactccacacatcgaccactatccagcatgcatctagagtattaagttcataagaacatagtaacgcattaggcaagatgacaggatgtagagggataaactcaagcaatatgatctaaaacccatctttttatcctcgatggcaacaatacaatatgtgccttgctgcccctgctgtcac

SEQ ID NO: 8499 - DNA, 407 bp, Triticum aestivum
  Clone ID: LIB104-047-Q1-E1-G2
cgggatgccgcattcgtcctgttacatcgtcttcacttcatctcgcccgccgtcaaaaccacctccaccggcacagaagtcgtgatgatcgatgtctccccaagctcaggttggatggccaccgtccgcggccgatgccttgccctttcccttggaacaggttgtcatgtggcgcactggaagcacccattcacagtgagactcctccaaggctgcgaggagcaaggacatggtgcattgatcgcattgttgtagaaggttaatccaacgcactcacgccagagccgagacaccatacctgcatgcatgttgttgtgctgtgggtgtgcatgtactccctttgtaccgaaatatttctagttgaaaagttatcacgtaaaatgtaaccgtttttaaggaaagaaaaa

SEQ ID NO: 8500 - DNA, 371 bp, Triticum aestivum
  unsure at all n locations
  Clone ID: LIB104-047-Q1-E1-G4
gattcttcatctatagtgatggctgcaccaattttacgagtcactaccatgcatatcaattcggccattcttgctgcaanaagccctttctttttcaagcttttctcaaacggcatgaaagagtctgacaagggacaggcaacacttcgaatagctgattcagaggaaaatgccttcatggagcttttgtactttatgtatagtggaaagttgacaccaacaactgagcccactcatctggttgatatcttgatggctgctgacaaatttgaggtcatttcttgcattaagctttgcggtcagttgctcacaagcttgcctatgaccccagaatctgcagtgctgtgcctagatctaccatattccatttc

SEQ ID NO: 8501 - DNA, 320 bp, Triticum aestivum
  Clone ID: LIB104-047-Q1-E1-H1
cggggaggcagatggtcggcgtatccttggcgcgggatggctcagaagaacagaccaaggcgatgagataagaggagggctcagaattgcctgccaccagtgtgcgtgccgtccagaagaagcggcctgcatcaatggctctgcagttgttctacgtactagtacttctttgttcgaaagaaacacaattctgtagttgatcgtggcaaaattctttgacatggatccaccaacggggcatccatctgaacttttgttgcagcatcagtatgtgcactgtttaacccgcaaaaaaaagcatgtgctatgtttttttggcg

SEQ ID NO: 8502 - DNA, 333 bp, Triticum aestivum
  unsure at all n locations
  Clone ID: LIB104-047-Q1-E1-H12
gcggggtcaccgggcccacatgtacgccgacggctgacttatgccgacggccgctgtcggcgtttattaatctaggtccatggttgatgtgtgaatactgttgccatcggggtacatgggggtagcccgacggccatgataagccgacggccacggctaggctatcgccgtatttggcggttggagcacgaagaccatcaagcactacggccattggatggacatcgtacggtcactggagctagaatcgttcatattgactaagttgacaaagccctccgtctccgtcaacttagtaggcccacaagtcagcctcncagcatgctgggtctc

SEQ ID NO: 8503 - DNA, 393 bp, Triticum aestivum
  Clone ID: LIB104-047-Q1-E1-H2
attcgcgggccaacaggtggtttatgtttgccgatcaaatgatgtacgtgttccctttcggtcaaaagatgattctgggctgtctccaaacatcacagaaaggtaattgtgttgggaaactgatgatgcgcatgccaggacgtgcgtattgtacaacttgatgtaccaatgcattggtagggtaagacggcctttgccatgtcgggtgcgctcgcttggcaagccacaagtcaataaaaagtatatttggtggtgtttgcggggtggagatcgcacgggaacaatctatttgttctattttgcccgggttctccaccctgccatggtgtctctgtccttctcctgtgttgttgattccaccgcatcatctgaagtacaccgcgatcctacata

SEQ ID NO: 8504 - DNA, 376 bp, Triticum aestivum
  Clone ID: LIB104-047-Q1-E1-H4
ggcgaccgaggcgatggactgctgagggttctgccttggtgaaattacgggtgcaacgtcgtgtccaattgctgggcctaaagtccaatcctttaaaggttcgagttccgggccaaaatttgtaagccggcggcgcaacaacaccattgccccgggcatctacaacaacggcaccgaatccgtatccatataccaccaccaatccgtgtccatataccaccaccgatccatatccatatactaccaaccccaacagcccccacaacctcaactgcagctgcatcctcaagcacagcagcctcaacaaccccaatcgcaactgcatcatcctcaatcacagcagcccctgcatcctcaactgcaaccgtatactcag

SEQ ID NO: 8505 - DNA, 412 bp, Triticum aestivum
  Clone ID: LIB104-047-Q1-E1-H6
ggccgacgggtgtacccagcggaggccatctatgccaacgctggggtctacctcttcaacaacgccaccagcgcccgggtcaacgtcacgaggctcgtcgtccacgagatggactcctcctacaatcaggcctacatgacctcactgtaaaaagaaaatgcaaatattatttttgtttagtaaaaatatgatagatagcacattgtatgtactgtttttagaccaaggaaggtcgtctcatttcttcgttacaaaaaaaaaaaaaaaaaaaaaaaaaaaaaaaaaaaaaaaaaaaaaaaaaaaaaaaaaaaaaaaaaaaaaaaaaaaaaaaaaaaaaaaaaaaaaaaaaataaaaaaaaaaaaaaaaaaaaaaaaaaaaaaataatataacataaaaaaaaaaaaagggggc

SEQ ID NO: 8506 - DNA, 392 bp, Triticum aestivum
  Clone ID: LIB104-047-Q1-E1-H8
ggcgaccgaagcgatggcctgccgggcgttcggcggcggcgagagcaagctcaaggcggaggcgacgacggacaacaaggggtggtacaagatcgagatcgatcaggaccaccaggacgagatctgcgaggtggtgctgaccaagagccccgacgcgtcgtgcgccgagatcgaggagttccgcgaccgcgcgcgcgtcccgctcaccagcaacaacggcatgaagcagcagggcacccgcttcgccaaccccatcgccttcttccccaaggagccgcgcaaggagtgcggcggcatcctccaggcttacgacctcaaggacgcacccgagaacccatgaacccccatcccatccatatagtctcgctcagttgcttcccatcatcatcatc

SEQ ID NO: 8507 - DNA, 354 bp, Triticum aestivum
  Clone ID: LIB104-048-Q1-E1-A11
ttctgacaagcaaatgttagattgcctaggagaggcacacacaccaccagaacccgctatacagctctccacggcaatgcttttgagcggcggagcgtcatcacactgctcagctttaactgatttccttttcctggcataggtcaaagctgctgcattgatgctaggagcattattagatgaattctcatgatccactaacagcgttcctgcgacggtcgcgagcaaatcaaacggggacatctcatctttctttctcctggctgagcgtttcccctgaatcatcaccgggcgttaatacataatatccagcacgaaaattgcgcggggtcatggcaggtagtacaggatatc

SEQ ID NO: 8508 - DNA, 120 bp, Triticum aestivum
  Clone ID: LIB104-048-Q1-E1-A2
tggactgtttctagggtatactccatacactatgcattatgtgtcaatttcacgttcgccctttaacagctccatgcctgcataggaggttgcatcagctgactgacgttatccaccaca

SEQ ID NO: 8509 - DNA, 423 bp, Triticum aestivum
  Clone ID: LIB104-048-Q1-E1-A5
tcccagcggtactaccggccacatgaccggtactaccggcttgcctgcgcgtagtgaagggggttttcacctcatgtatcctctcccacttaccccttcgtggcttagactttaaatagaccacctccaccttctttctaggggaagcaaatatgatagctcattcttaggtgagctttgctcctacctctacctaagaggcaaggctctatacactagaatagttttgatgtgtcccgtcaactcacagaacgaggagaagctttcttagtatgccgtctcccccgccaacgggcacggtggcttgcaggatgaggtgaagcttgcttactagtacgccttatgcccgctccctggcccaagcgcgtggttgatcacaggacaaggagaaaattttactactccgtcgtttactcctcaacc

SEQ ID NO: 8510 - DNA, 424 bp, Triticum aestivum
  Clone ID: LIB104-048-Q1-E1-A7
cgaggacgaaaacagctacaaatgggccagctgcctttggttcagatatgatgaaacttgagcctgctaacgatggggaaaaagaaagtgctcgtcataagaaggggaaagataatgaggagggtaataattctgataaaggtgaggagaatgaagaagaggaagccgctcgtaaagataggctcgggctctctaaaaggggcatggatgacgatgaggaaggtggaaaagatctagattttgatttggatgatgacattgagaaaggtgatgactgggaacatgaagaaacattcaccgatgatgacgaggctgtggatattgacccagaggagcgggcagatttagctcctgaaattcctgctccacctgaaattaagcaggatgatgaagagaatgaggaagaaggtggcctgagcaagtc

SEQ ID NO: 8511 - DNA, 417 bp, Triticum aestivum
  unsure at all n locations
  Clone ID: LIB104-048-Q1-E1-B1
gggggcatggaggcgctcaaaaccgccaccctccttcttaaagcgtccggggacgcgagcccgggccttcagaagcagcgctacccagatctgaccaaggccgacgaggtctgctttgaaacctgctacaaggagctgaccaatggcggtgagaaactcgacaatttgtgcacgagcaaagagggctccgacgatatcggcatggcccagctccccgaaatccgtagcttcatcaaggagaacaacggtgcgcatgcccagtggaattgcgataggtgtcgccctgcaaatgacaagaagacacccgatgatgtctccaagaagaacgatgctgagaaggccatggctgtcctgnaggtgcttgtcaacaaagtgaccaaataaagaaaaacaaaccctcattgcatactactagct

SEQ ID NO: 8512 - DNA, 412 bp, Triticum aestivum
  Clone ID: LIB104-048-Q1-E1-B10
cggccgcgagaaacacggaggcatcgggcggacgagacggcgatgacgagcaggcggccatgtcatgtcttaggggtgagtgttggcaataagccatgcatgtgatggtggcgaccggcttgaaggcaactaggtcaagtctgtaccgtgtgtgtgcactcaagtccgacacgtacggcatagccgatggcaagtgtgccggccaagtctgctagatgcatgcacgtagttagttggagcgcatctcatgctcgaccatgtcgttgccgttgaggtatgatgcgcatgtgctatatgtacgtgcatgcatgtaggagtcagcaagaagttagctggttagtggccggtgggcgtgcgtgtgtggtggccgggttagtggtgtgcgtgcatctgtgctagcccgggtataaaa

SEQ ID NO: 8513 - DNA, 378 bp, Triticum aestivum
  Clone ID: LIB104-048-Q1-E1-B12
gcaggttcaagggaaagatgcgacggagttagaagttgcaagtatgaattgttatatctcgacctgacagaattatactaaataatgctcttgttcaatcgtcaggctccggttcaagtactgcaaaaaaaataaactagatcagatttaagaaactcaagattatgttcaaaaagaagtttgaatatgaatctgaaaaaaaatttgaaattttaaaatctcaaaaaagttgatgtgacaggtgcactggatacgtgaaaacaagacgaacctataggctcaggtttcatctaatttggatacatgagtgaaaacttatggctatttgaaaaatcatggttaaacggttttacggaaaaaaattagctacgggaaaag

SEQ ID NO: 8514 - DNA, 398 bp, Triticum aestivum
  unsure at all n locations
  Clone ID: LIB104-048-Q1-E1-B2
ttcccaagtccacggggtcgtaccaaggcaagtatcagcttcgactgcttcacccacaggaaggcggtgctgatccgcgggttcngtggccaggcgaatgcaatgtacccgccctacacggcagagaaacagaggatcttgaggggcctcatcanaggcaccttctttgcgctgatccttgcgctcctggggttcccaagggagaagcgttagctgagttgagctccctcccttctccagtagagcatagcaggattgttcatgttcatgagggcgatgtggtgcacttctgcactgtgaagcgccagtgcgcgagtgtgttcaacaggtgtaaaatatgggactatcatcggatttctggatgtaatttaattttacataaataaacctggtttgcc

SEQ ID NO: 8515 - DNA, 407 bp, Triticum aestivum
  Clone ID: LIB104-048-Q1-E1-B3
cggggaccaaaaacataccggagtgaccggcacggggacgcacgacatcggcgagaagaagagcctcatggagaacatcaaggagaagctccctggcggccatggtgacaaccaacagaccgctggcacctacgggcagcagggacacgtcgccacggggacgcatggcaccccggcgaccggtggcacctatggggagcagggacacgctggagtgaccggcacggggacgcacggcaccggcgagaagaagggcctcatggagaacatcaaggacaagctccctggtggccacggtgaccaccagcagaccggtggcacctacgggcagcagggacacaccggcgcggcgacacatggcaccccggctggcggcggcacctatgagcagcacggacacactggga

SEQ ID NO: 8516 - DNA, 365 bp, Triticum aestivum
  Clone ID: LIB104-048-Q1-E1-B4
attcccgagtccacggggtcattgaaaagatcgacggagtgtgcacggacgctaaatctcatgtcagaacaatgtcagggacatcgccaacttcattgatgtagcactgatgatcattgaaactcacttctatattatcatgtcaggttagacccaatatagtgacccttccagtcagtcgagaattgcataaagaaggctacacccttgaggagtcctttacatgcatctagaggtttactcactacatgatacgtgctctagacttcagcatcatagtagatatgagtccccacgtttggattcaacacaatcattctgtgctttagccaccttttgagagagacacacatgattcagaactt

SEQ ID NO: 8517 - DNA, 411 bp, Triticum aestivum
  Clone ID: LIB104-048-Q1-E1-B6
cggacatcggcactgcgccgtgttgcctggcacaaccaaggagaacctaaaaaatgccaggaaaaggaaaactccgttccggttaatggcttcaaccaagccctccctccaaaaggggcaacgcttgaccctgaccaagacccaagtgaccacggtaacgcaaataatgatgatggtttgccaaatgagtatgtcctccgggcaaggcttaatctgcttcttcaaaaattggctgagaatgaccccaacccgtatgggacacccccaacgaagaaagaagcagtctaaaccctgcccacggtcaaaatctaagaggttgtcaactgttcaatctgtcttgatgatcttgatataaggtcccacgctaagcaattgccctgtgaacataaattccacccaccatgtatcctg

SEQ ID NO: 8518 - DNA, 323 bp, Triticum aestivum
  Clone ID: LIB104-048-Q1-E1-B9
aacccccaagggctgttcaagaaactcaaatccaaatttcaaggccggcttcgggcaatttgggccctggttgctcgcctccgacgacctcaaggaaagaacagctgttttcttcaaggtattcaagaacaatgacaccagctatgtcgtcctcatgtgcaacgaccctacaaggtcgtcattcgagtcgcagatctacaggccgaccttcgccggcttcgtcaacatcgacataaccaagaccaagaagatcgccctcaggacattgatcgaccactctgtggtggaaagttttggtgccggcggcaagacgtgcatcctga

SEQ ID NO: 8519 - DNA, 195 bp, Triticum aestivum
  Clone ID: LIB104-048-Q1-E1-C11
tcttgaaacccgatagcccagaaggaaagtcccgtaccaaaaaggaaactggttaaataataaatggggcaatttaagttttgccaccatccaaaccgaaaggaaaacctctgtccgggcgaatttaaccaaaaaatcatttatactggaaatggaacagtcccgttcaaaggatccatgctgacaaatgcctca

SEQ ID NO: 8520 - DNA, 377 bp, Triticum aestivum
  unsure at all n locations
  Clone ID: LIB104-048-Q1-E1-C2
ttcccgagtncacggggtccgtcgacggcatcgctctccactgtgggaggatcgccacttgcagtgcaacgtgatcaccgctccaacctccgtatcgctgcgcatcacggtgacctgatcctctcaccatttcactcactctctcagcaagctccgccatcatgatcctctgctgtganggggaatccgctgtcgagcacaagtcctcgtgtccatcatcgaggcaccatcatatcctcacaccacggcaaatggtacacacatactacgcataatgaggggatgtacgctattgcagaatggcaccgtcactctcccgttttacacactggccggacctagcctcccaaccccaaaggccttagccctgctcgacc

SEQ ID NO: 8521 - DNA, 419 bp, Triticum aestivum
  Clone ID: LIB104-048-Q1-E1-C3
acggggtccatgaatgggccgaaatcgtgtcagcaatccaggactcagacttctggcagcaattctttcggatcgagtcggagtttgcggaaatcatctatcaggatgtccttcggacctcggggcatttctacctcaaaaatcaggagtcaaatagtgacatcgagacaatgcaacaaatgcaggatgacaacgcccgttctttcatgactcccaggatacagggcggcttcatcgagacgccggtcccttgattcgagttgtctagttctgaaacatcgattggctcatgttgtaattaaacattagtgaacttgtactatgtctctttggttttgagagtcgttcaacttagaagtaatcgatgctatcaaagtcttgcttttctcttccgattgttctgttgcataagtatatat

SEQ ID NO: 8522 - DNA, 425 bp, Triticum aestivum
  unsure at all n locations
  Clone ID: LIB104-048-Q1-E1-C5
tcccgggtcgacggggcagtcgatgccaggatgctgattgtgatgagcattaagctgaagctcgctcttctcggcgttcgcaagagacggcgtgacctgtgaatacatcgagtgcggcatgtaacataggcaaatagcctgcctgaagagtgagggagagaaaacctgcatagattttgttctggcgtttttgtgtgtgtttctagtgattgtttgggtttattttccgcgcttatggatgtacattacaggtatataagacagcatagtgatgatgtcttcttcatggttatggaagtgaaagtaatgttatggaagtgaaagtaatggtatgaatgctgtcttcatggttataagacagcatagtgatgatgttttagatacaananaaataaaaaaaaaaaaaaaaaaaaagcggccgctct

SEQ ID NO: 8523 - DNA, 408 bp, Triticum aestivum
  Clone ID: LIB104-048-Q1-E1-D10
attcacgggtcgacggcgaacgtgatgaccatcttcgaggaggaaggcgggcggccggacgccatcatgatcctgacggtgaagcgcgacaacatctgcagcttcatctcgggagaccaaccccgggcacgtgcggtcttgggagaccaaggacagccagctgacgatggtggcggacgacctgaatccgcgggcggtgctgacgtgcccggagaagaagatgatccagcagatggtgttcgccagctacgggaacccgctggggatctgcggcaactacacgtttggcaactgccacacgcccaaggccaaggagattgtggagaaggcgtgcgtggggaagaggagctgcctgctggccgtgtcgcacgaggtgtaccgcggggacctcaactgcccgggcaccac

SEQ ID NO: 8524 - DNA, 351 bp, Triticum aestivum
  Clone ID: LIB104-048-Q1-E1-D12
cgaaaccatcaaccagaactacaccgtgtgaggagtatcggcattggaccaacaaacatgacatccgtattggagcgaaattggaatggacccccccttaaaaattttcccggggaatgaatgaaacaaacatggctgatctgacaagccccaagttgtaaagtgctaccaaatatatggtttcggttgcccgtcttctagagaggttttaatgttcaagtggagttataccgtgtttggaccacggcgtggttgtaatcgttttcgcgttttacccagtttcccctaactagtcggtgatcttgcggaagcaagaggagatataatcactgcaaattttctgcccaaaaa

SEQ ID NO: 8525 - DNA, 391 bp, Triticum aestivum
  Clone ID: LIB104-048-Q1-E1-D3
cacggggacccaatagcgatctcaaggtccatgccaaagctgaaacaactcgtgctcaggtacgcatagctatctggcgtcggcctcaactcgatcgcagaaggatgcaaggacctggaggtcctggacctgtttggctgcgcgaatttgacgagcaggggcatagagcaggctgctgctaacctgaagaacctggagatgctggtgaagcccaacttttacataccgaggtcggccttccacatggagaggtacgggcactggcagttatacgacgagaggttccagacaaacgtatttcagatatgaaaagaacaaccctcgtgttctcagggtcgcctctgactgacaacgtctcgcatgctcgttactgttatatactgtatgtgta

SEQ ID NO: 8526 - DNA, 404 bp, Triticum aestivum
  Clone ID: LIB104-048-Q1-E1-D5
cggtcaaggactcccgggtcgacggacgccaccaacgcgaccaagtacgacacctacgtcgccagtctcaccgagtcgctccgcgtcatctccggcgccttcgaggtccatccgtcaagcccgccgccgaagaggtcaaggggatccccgccccgcagctcaagaccatcggccagatcgacgccgcctacaggaccgccgccaccgccgccgacgctgccccggtcagcgacaagttcaccgtcttcgagtccgccttcaacaaggccatcaaggagaccacgggcggcgcatacgacaactacaagttcgtccccgcccttgagtccgccgtcaagcatgcctacgccgccaccgtcgcctccgcgcccgaggtaaagtacgccgtcattcaggccgccctg

SEQ ID NO: 8527 - DNA, 427 bp, Triticum aestivum
  Clone ID: LIB104-048-Q1-E1-D7
cggtcaaagactcccgggtcgacggggttgagcaaactaggaaaagaatttgaaaacgatcttggagaagacatttgactgatgataaatcattcttacgtcaaactttgaaaagaatttgcgaatacctccgggaaaataagaagagtcaggtaagatcctggaaaagacatgtgggttagggcccactcaaaagaaacaccgtagaacgattgcttgaaaagagagagagcgccggttgaattaaatggcttgaatgagataacaacctcgaaatattttgaactgatcttgaaagacgagacgagccttttgagatatcttgagcactccgggacaatagaatagcgagagatgaacgattaagaattgcaccggcatgagaaagcattgaaatacggaaaagaatatgatcacacaccgaaag

SEQ ID NO: 8528 - DNA, 421 bp, Triticum aestivum
  Clone ID: LIB104-048-Q1-E1-D8
ccgggtcgacgggcattcgtacaccttgatttcgagtgtgaccacaagccagagcactcgatcctcagcaagcttcctagcagccagccttgattaccatctgaattcactgtggaaaacgcaagatgttggctattttgcttgccgtgcaggattcgctacagtacatggtgtcttgcgctatatggaagggctgaagttgagctaggcattgttggccatctaaatgagataagaaccagcgttggagactgtatagacttgttttgcggagccctctaagtgtcatgtttcgagtaaaagtaggttacttttgcttcttgaagctgtcattgtttgtctgccacgagggctgcaatgtggaaatgtttgccacaaaaagaaagcaagcgatttttgtgtgctcaaagtcagttttgtg

SEQ ID NO: 8529 - DNA, 269 bp, Triticum aestivum
  Clone ID: LIB104-048-Q1-E1-D9
gcctcttcggtaccgtgcattgccctttctcaccttgagagttggtgcaaacttcgccggtgcattaaaaccccgtgatacgatatgctctatcacacataagcctcattatatcttcctcaaaccagccaccatacctacctatcatggcatttccatagccattccgagatatattgccatgcaacttccatcatcatcatatacatgacttgagcattcattgttatattgctttgcatgatcgtaagatagctagcatgatgttt

SEQ ID NO: 8530 - DNA, 383 bp, Triticum aestivum
  Clone ID: LIB104-048-Q1-E1-E1
cgccgaccaaggattctatcaatgtatcatcagtatcaatcactacatgacaccacacaacagatatgctgctgtcagcagtcctctctaaatagacactgcaattatcgtataagtacatcattgctgctgtcagcagtgctctctaaatagacactgcaattatcatgtacatcattgctgctgcaatgaaccattaagaattatttaaaatctagcctaccatctgcgttgtcgtcaacagagggttgaggcggagttacaaaatctgtatgagaaaccgagggattgtccgagtcagcgacatctttgttatcttcagagctgtcagaagcagctgagatggcgtcacctgattctgaatgtgttctgtccacatatgc

SEQ ID NO: 8531 - DNA, 385 bp, Triticum aestivum
  Clone ID: LIB104-048-Q1-E1-E11
tctacgaatgaaacggattacatggaaccctcggaggaaccccatgaaccaatttgggtgaaggatttcatcaccgacctaggagtcatacccaatgcgtcggggccaatcaaactcttctgtgacaacactggagctattgcccttgccaaggagcccaggtttcacaagaagaccaggcacatcaagcgtcgtttcaactccatccgtgaaaatgttcaagatggagacatagaaatttgcaaagtacatacggatctggatgtcgcagatccgttgactaaacctctctcgtgagcaaaacatgatcaacaccagaactctatgggtgttcgattcatcacaatgtaactagattggtgactctagtgcaagtgggagactg

SEQ ID NO: 8532 - DNA, 386 bp, Triticum aestivum
  unsure at all n locations
  Clone ID: LIB104-048-Q1-E1-E3
cgggacgttgaaaagctgaaatggaggatagtgaagtggctgaagcccggtgggcatattttcaatcagggaatcgtgccttccacagtctggggattcaanaaggaaattgaacccgacgcacaaccggaagccaaggttctacaccaaggtgtttaaggaatgccactcctatgaccaagaggggaattcctttgagctttctctggtaacttccaagtgcattggagcttatgtgaaaagcaagaagaaccagaaccagatatgttggctgtgggagaaggtcaagtgcacagaagacaaaggctttcagagattcctggacaatgtgcagtacaaatccactggaatcttgcgttatgagcgcgtgtttggggagggttatg

SEQ ID NO: 8533 - DNA, 160 bp, Triticum aestivum
  Clone ID: LIB104-048-Q1-E1-E4
acggaactctgaagagaacactaacctttttgattccgccatggcaaagggaaagcaaaccgtaaagaagtgaacaagaaagaaaaggcaaattaaattgcaaaggttaaattggggaaaagaaaaccaaaagcaaattgcaagttataaaatgccaagg

SEQ ID NO: 8534 - DNA, 372 bp, Triticum aestivum
  Clone ID: LIB104-048-Q1-E1-E5
ccgggtcgaccgaggagagctgagctgaccaactggtttgcgccatgtcataacccgtcgattgcggcagctcatggcaacttcatgacctgcagcatagaatctccatgggagacctgccgtctggtggcacacttcaatcggcatacaacagatgacccgttcatcagactgtatacaaaggccaacgatggctcatatatcgatcacaaggagatccccctggtgtggcatcactacgacgcggattgaaacttcggttcatgccaggcgaatgagctgctcaaccatctcgagagcgtgatcgctaacaacccggtcgtcgtgaatacgtgccattacatcgtggcggttcatcctcagggcatcagc

SEQ ID NO: 8535 - DNA, 345 bp, Triticum aestivum
  Clone ID: LIB104-048-Q1-E1-E9
gcccctcccctccaattgcaaggcgcccaaatccggagttccgggccaaccgatctaacgggttaacctggcccgaacaaccaaacccaaccggggataaccaccaaatgggggtgtggaaaaatagaaaaaggaatttctcgataagttgatttcgcggtaatatttgttctcccgcctcggttcatttgctgtataaccatcaaactcttgatatcaagagttttgtgttttaacttccagtgctgctgttcatatatgactaatatattctcccccaaatgatataaaaaaaaaaaaaaaaaaaaaaaaaaaaaaaaaaagaaaaaaaaaggataagaaggt

SEQ ID NO: 8536 - DNA, 377 bp, Triticum aestivum
  unsure at all n locations
  Clone ID: LIB104-048-Q1-E1-F1
attccgagtccacggggtcaagaaagagaacgacaacatgcagatcgagctcaggcatatgaaaggcgaggatgtgaactccctgcagcccaaggaactgatcgccattgaggaagctctcacgaacggccagaccaacctcagggacaagatgatggaccactggaagatgcacaggaggaatgagaagatgctggaggaggagcacaagctgctggctctgaggatgcaccagcaggacgacctgagcagcggcatgagggagatggagctcgggtaccatcanggtanggatttcacttcccagatgccgttcaccttccggctgcagcccagccaccccaacttgcangaagacaagtatgccaccgaatcct

SEQ ID NO: 8537 - DNA, 401 bp, Triticum aestivum
  Clone ID: LIB104-048-Q1-E1-F12
cggctgatccgaatgataattgtgatatcaggattaggagggtgaatgttacagctaatcttgatatttgtattagcaggtttgagttttgcatgtagtctactccattgtggagttcgtccgacgaaagctttatgtgatcgcgccaaagaggtgagatgccagaacgccgtgtgacgcggcgagcacggcgagatgccgatggtgctgcgttagaagcggcaagacgtatcacaggctggagccgtgatggactgcatcaaattgggtcgggtgaaccggccggtcgttctgtttgttggactacctgttcatgcgtgagttcgtttagtcctagccgagagtatcgttgctagtacttgatgcatgcatgtagttggcctggtcacaagtggttaccg

SEQ ID NO: 8538 - DNA, 409 bp, Triticum aestivum
  Clone ID: LIB104-048-Q1-E1-F2
acggggtccctcaatgaacctgaggggacagagtaagtgctctcaatcatattttcaacacatgacaacattttcttattgtacacaatggaatcatttgattcttttgcaaaaactggattcttcaagggaaagggccttaaaccgaacaacttatcacggtcccgttgaaggatttttggccgggcctattctgcccgcggccagacagggacccgcagcagcgggttttggccatgagctgggtccactacgaggcttgcaacaacgcggagtacgggacgaccgctaaggccgtgatcaccaaattttgggtaagttctcttctgaatcacttgtcttcagtttcgttcatagtttatcattgaatcactcaactcatgccttgtttgcttccggtttttgcatg

SEQ ID NO: 8539 - DNA, 272 bp, Triticum aestivum
  Clone ID: LIB104-048-Q1-E1-F3
aaatactcctatgtttttctggaaagaaccctgtatggtaaaaagtatttcatttgttaattcgttgttcgttatgagtaatatatatactccttgggattaataaatcatgggaagataaaagcacttggcgtatacgtatttgacgtgccaaactctgtgtatccagtgtgtatcggtgtacgcatttgagacttccaaacgcgtagcacgtgtgaaagtaattgcatctatagccgacttcacaaaagaaataaaagaaaaaagacaaa

SEQ ID NO: 8540 - DNA, 378 bp, Triticum aestivum
  Clone ID: LIB104-048-Q1-E1-F9
gaaaccgaaaaactttcgtaaatcacaaatttacctcaatggggaaatgcatttccccaacattaagcatttcaaatttctttttgacagtaggtagaggtatttgaaaacttccaatagtgattgtcggagatttttcaataacattaataccattcacctggaattgtttcttcgaaaagtgcaccgtatgctcattaccattgatatgaaaagtgatcttgcttttattgcaatcaataacagcccctgcggtattcaagaagggtctaccaaggataattgacatgttgtcgtcctcgggcatctcaagtataacaaaatcagtcaaaatagtaacattagcaacaacaacgggcacatcctcacagataccga

SEQ ID NO: 8541 - DNA, 397 bp, Triticum aestivum
  Clone ID: LIB104-048-Q1-E1-G11
cggcggttcggaggaatacctctgaacgtattcggcttgggcattggtgggggatgcggatttggccttggtttaggatggggctttggaactgcttatggttgtcaatatcgatcttcaagggtccagtttcagggcattgagtttcagaaaaagtctgaaggagatgaagcaccaaagcttgttgaaaagtctcgtccttatggctagtatagctgcgatcatacaattggcacaggcaatgttaccattgcccccttgattgtagtcaattgtctacctggaaagttgtttgaaagcattttgatgttttgatgaacttggacgttttcatggtaacataatgaggataatccatggtacttttttcgtttcggaaaaacaaaagaaacacaaa

SEQ ID NO: 8542 - DNA, 386 bp, Triticum aestivum
  Clone ID: LIB104-048-Q1-E1-G12
ggttgagaagctgattggcaggatagtgaagtggctgaagcccggtgggcatattttcatcagggagtcctgcttccaccagtctggggattccaagaggaaagtgaacccgacgcactaccgggagccaaggttttacaccaaggtgtttaaggaatgccactcctatgaccaagatgggaattcctttgagctttctctggtaacttccaagtgcattggagcttatgtgaagagcaagaagaaccagaaccagatatgttggctatgggagaaggtcaagtgcacagaagacaaaggctttcagagattcctggacaatgtgcagtacaaatccactggaatcctgcgttatgagcgcgtgtttggggagggttatgtcagca

SEQ ID NO: 8543 - DNA, 419 bp, Triticum aestivum
  Clone ID: LIB104-048-Q1-E1-G3
cacgggaacgccgtaaacgccgcacgccgcgccggcgtcgacatcgacatcgccaacaagcataatgctggaacaaacaaagctgctcatagcacaacatcgctcaatacaaaaaggcttgatgatgatacagagaatcttgctcatgagcgtgtgccgtcagacctgaagaagagcattatgcaggctataacggacaataggctcacacaggcacagcttgcacagctgatcaatgagaagccacaagtcatccaggagtacgagtcacgcaatgctatcccaaaccaacagatcatcggcaagctggaaagggctcttggcacaaagctgcgaggcaagatgtgaagccgcgtgcatctgacaggagtcgaggctttcaacagagcttggctgggcaagtttaccgctaaataaag

SEQ ID NO: 8544 - DNA, 310 bp, Triticum aestivum
  Clone ID: LIB104-048-Q1-E1-G4
gtaggagtgatatgtcaagtagtggacagataacccaaccactggatgtggttttcagggatttttgcagtgggatttgtagggtactatgctgcgctgtgtttgggatttgaaataaaacgatgggagatgtgccacgctcttaaatgccagtcttctgctctaatcttgccaaattacttgttgcaatttggaacttggccaaaaaaaaaaaaaaaaaataaaaaaaaacaacaaaacaataaaaaaaaaaataagaaaaacaacacttgatgaaaaaaatttcattaaaaaaagggccggttccaaa

SEQ ID NO: 8545 - DNA, 414 bp, Triticum aestivum
  Clone ID: LIB104-048-Q1-E1-G6
cggactctactaatgctattatggctgaagcggaacttaccttaaatgctcctgctgatgttgacgcagatctactgaaggatgatgatgatgctcagctactacagcaagcactcgctatgtcaatggatgagggtgcttcaggatctgcagctgtggctgatgctgctatggcagaagctgctgcagatgaccaggatttggcattggctcttcaaatgtctgtccaggacgcagaggtggctggtcaatctgatatgagcaaagtgtttgaggacaggtcatttgtgacatccatccttaattcgcttcctggtgttgaccccaatgacccatctgtgaaagatctactggcttctttgcatggccaaggagagcaggaggagaagaaagataaggaggacaagccataca

SEQ ID NO: 8546 - DNA, 413 bp, Triticum aestivum
  Clone ID: LIB104-048-Q1-E1-G8
tcccgggtcgacggggcaagcgacatcgctgccatggaccgcgtgcttcatcagtaaatcctcatatacatcaggcgagccattcactatgattattgcaacataaccggtgttgcggaaacatagtcagtgttgcaaaaacatagctgcttcaaaaacatccctcgtgcttcaacaagaacggcagagctgcaagacaaggtaaccgctatggcgggatgtttctgaaacatggcctatgttgcagaagtccacgagaccatgagaaataaattccgcaacacaatctttgttgcaaatatttccgttacacgagctctgttgcaaagatccgcaacacaatctttgttgcaaatgtttccgcaacacaagctctgttgcaaatgcttctgcaacactacctttgttgaaaa

SEQ ID NO: 8547 - DNA, 364 bp, Triticum aestivum
  Clone ID: LIB104-048-Q1-E1-H10
gccgagtcgatgtcactgtcgggagcgccctagacatattcgggggagatttgccctacgacactgttgtccattggcacaaggagcaaaacctggttagccaacggtgaagaaatcagatgatccttttatagagcatgatcaaaagttcagagctcatgtgtgatccccacctgaccataggtcaggttatagagctttgttgtttgctggacattgtagtgtgaacattgtgtgtgtcttgtgtgacatgtcaaagctgaagcggaggtgtgaactcggtgtggtagaagaccactcggtattcagatactgttcttcacattctgtttgtattgtggtactggtaatgatgaataaacag

SEQ ID NO: 8548 - DNA, 391 bp, Triticum aestivum
  Clone ID: LIB104-048-Q1-E1-H2
cgggatccccgtatgaagcggagtacatggcagcctcggaggcagcacatgaagcgatttgggtgaaggagttcatcaccgacctaggagtcatacccaatgcgtcggggccgatcaaactcttctgtgacaacactggagctattgccctcgcaaaggagcccaggtttcacaagaagaccaggcacatcaagcgtcgtttcaactccatccgtgaaaatgttcaagatggagacatagagatttgcaaagtacacacggatctgaatgtcgcagatccgctgactaaacctctctcgcgtgcaaaacatgatcaacaccagaactctatgggtgttcgattcatcacaatgtaactagattagtgactctagtgcaagtgggagactgt

SEQ ID NO: 8549 - DNA, 226 bp, Triticum aestivum
  Clone ID: LIB104-048-Q1-E1-H3
tcatttgcccttagccatgcgccgtttgcattcactatttgacagtgagcggtacataggaggggacaatctttatttttggttacatgctgattacagacagtgtactggttctgtcgaccgaactatggagcatgtctttgtcatgttcaattgatttttcttcttcattctgctgtattactgaccttgatattcaacctgaagtgggtgggtttattcctcc

SEQ ID NO: 8550 - DNA, 379 bp, Triticum aestivum
  Clone ID: LIB104-048-Q1-E1-H4
tgttcggcaatttggtcaacggcactgtgttcaacaaaaaaaggacatgaaggcaacaaaccattcgatttcaagacggatgaggagcaggtcatcaaagggctggacacgacagtgctcaccatgaagaaaggagatgtcgcgtcagctagaataccacctgaacatgcgttcggttccactgagacgaagcttgatattgctatggttcctcccaactccaccgtcttttatgaagtggacctcgtttccttcgagaaggagaaagaatcttgggacttgaagagtaatgctgagaacatcgaagcagctgctaaaaagaaagatgaaggaaatgcgtggtttaagatgggcaagtacgccaaggcttccaagagat

SEQ ID NO: 8551 - DNA, 266 bp, Triticum aestivum
  Clone ID: LIB104-048-Q1-E1-H7
cccgggtcgacggggagcacaagaaggacggcgggcaccacgagggcgtcagcgagcacatcaaggacaggatccacagcgacggcatgatggacagcatccacgacgagatcaacgacaacagccacagcaacggcaagaaggacggcgaggaccacgaggacaacgacagccacagcaacaacgacagcaaccacgacaacgaccacaccgactccgacccgcactccagcagcatcaacgccagctccatcaacagcacctgc

SEQ ID NO: 8552 - DNA, 402 bp, Triticum aestivum
  Clone ID: LIB104-048-Q1-E1-H8
tccgggtcgacggatagtactaataaaaaggctagtcacaataatggtgtccagcacaacccacccctcaaataaaactaagggggtgcttggatatgttttagtcccatgactaaaagtagtgggactaaaacatgctagcctcacccatgcttggatccgaatactaaaaaggctaaaatcaagttaatgagcatttattatcctccaaaccctccaatccataactcgcctgtgttaaaggagaggagttaaatgactagagagaggactaatccacattttactaggggtacccctgactaaatttttttagtctcaagactagttttagcccctctttagtcaggggtgcttggaactttagcctcttaaagagactatttttagtcagactaaaat

SEQ ID NO: 8553 - DNA, 426 bp, Triticum aestivum
  unsure at all n locations
  Clone ID: LIB104-049-Q1-E1-A1
tacggtcctacnattccgggtccacagccaggctccaggacaccgccaatggactccgaactacttcgcggcaggatagcccggcccgtccagagctcaattaaacactccggcgaaggctaggacaggccgcataccgcggctcaaccgctctccggcacacaaacatttcttacatttgctttgcaggttcacctttgcaccgaccaggactggcgatatggaagcaactcgaatgcgcaagggaatccttagatattccccgcagtgaccatccgaatatactctggatccacacacagcttctttccccctgatctcagcaggttccacagtcatatccctttttttatctcattacctgtcctcatacgcatcaacgtactattcaaatacaacatatggatttatatgacgcttatctgc

SEQ ID NO: 8554 - DNA, 358 bp, Triticum aestivum
  Clone ID: LIB104-049-Q1-E1-A10
gacgggcacataaacctccttatatcttcctcaaaacagccaccatacctacctattatggcatttcgatagccattccgagatatattgccatgcaactttccaccattccgtttatcatcatgacacacatcattattgtcatatttgccttgcatgatcatgtagttgatatcgtatttgtggcaaagccaccatgcataaattttcatacatgtcattcttgattcattgcccatcccggtgcaccgccggaggcattcacatagagtcatattttattctagttttgagttgtaattcatgagttgtaaatatatagaagtgtgatgatcatcattattagagcattttccct

SEQ ID NO: 8555 - DNA, 410 bp, Triticum aestivum
  Clone ID: LIB104-049-Q1-E1-A11
gacgggaaggtcaatactgatatgcttggccccacgcgtagtagtcttcttcaccctgcaaaaaaataaagcacatgaaaaaggtattaaaaatgaacaaaaatatgtttgccttggtagaaatcttaaaaaaatgaaaaacaagtggaaaggctggtagttgccatgtaaggggaacgtgagttgccatgtgtcataattagcagttgccatccagcagcagttgccatgttagccaacttgaagaatgataaaaatgtctaatctgtcatgaatacaatttcaaacctaggtgtaggatgagctcacaagccaacggtaaagatggcagttgccattaggtacattaaagttaccatttggcctagattccagttgccatgtaaaaaacaataggagttgccatacac

SEQ ID NO: 8556 - DNA, 410 bp, Triticum aestivum
  Clone ID: LIB104-049-Q1-E1-A12
gacgggaagagacagatttgcctagggtttgtggcagtggctaagacatctgaactctgtggcgccggatagaaagaatcggtggggccgagtttgactttaggtctaggtcatatgtgtggaagtagttgagggttttggagcatatcacgaagcactgtggagcaagaaactcattaagcaacacctcatccctccttgatagtactggcttttcctatagactcaatgtgatcttggatcactaaaatgtaaaatgaagagtcttgagcttgaagcttgagccaatcccttgtccttagcatcttgaaggagttcccacatcctttagtccatgccactccattgttggacttgtctaaaatgtactaggtaaaagtgttagtccaacaagagatatgttgacatta

SEQ ID NO: 8557 - DNA, 377 bp, Triticum aestivum
  Clone ID: LIB104-049-Q1-E1-A3
cgcgtaaaatttgaactgtagctgcctcatagtttgctctatatttttttcagaaatcatttctaggtacataagtatctatttaacagagaaacatcaaaagttttccaagatttaaccactagctaggaacggtcaagcccgcccttttgaccgcattttgaaaagggcataaaaaattcaaaaaaatcaaaaaattggaaaaccttcgcattgtgtcattatatgtgaccaagtttccacgaaaaataataaatttgttatacggaaattgtttttaaaaagtgttctcaaaaatgagttgtcatgcgtgaggattcatggctttcaagccaaatgatcaatcttatggccacattcatggcatagtttgttca

SEQ ID NO: 8558 - DNA, 378 bp, Triticum aestivum
  Clone ID: LIB104-049-Q1-E1-A5
cggaaggccgggcatcccgccggccttcaggaacgccgacggcggctacggcaccatcaaaaccggctacggctacaagtacaccagggtggcgacacccaaacggtccaagaagaagagctggttctcctgcaccagctgccgattctgatgccgtagctgcttgccgtcgttggtgagagagatccgatacttcgccgcgccacgaccagaagcacgcactccgggaggcgacggtggaacttttggcgatcttggcgtttttgtccctgctcggtcgccgcacttggcgtgcagagcatcatcgacaactgatggctcccgttcatatgtacgaataatttgtggcgaataaaaggggggaagtgactacaacaa

SEQ ID NO: 8559 - DNA, 401 bp, Triticum aestivum
  Clone ID: LIB104-049-Q1-E1-A6
gggtcgacggaaattgcaaacctaacgaagctcataatcaggtggttgaagtgaatgtcaaagtcgaaagtgcaggcacaaataatgtgcacaacaatgctttctatgctgaagaaaaaatactgaaatccgagttgcaagcaatgagagattgtgacccttcatctgcgcggcattggattgttaggaacacaagggctgtaaatcgtaccggacaaccaactggtttcagactcgtgcctggttcaaactgtttgccatttgctctgcccgaggcaaagtttcttcgaagagcagggttcctaaagcacaatctttgggtgacaccatacaagagcgatgagaagtttcctggaggggagttccccaaccagaatccacgtcttcacgagggtttggct

SEQ ID NO: 8560 - DNA, 343 bp, Triticum aestivum
  Clone ID: LIB104-049-Q1-E1-A7
ttgaaaatctgattggcaagattctgaagtgtctgatgcccggtgggcacattttcatcagggagtcctgcttccaccagtctggggattccatgaggaaagtgaacccgactcactaccgggagccatggttttacaccaaggtgtttacggaatgccactcctatgatcaggatgggaattcctttgagctttctctggtaacttccaattgcattgcatcttatgtgtagagctatatgaacttgcccagatatgttggctatggcacaaggtcaagtgctacgaagacaaaggctttcagatattcctgtacaatgtgcattacaaatctcctggaatc

SEQ ID NO: 8561 - DNA, 350 bp, Triticum aestivum
  Clone ID: LIB104-049-Q1-E1-A8
gagcacatgatcgccagctgcatcaggttggcatgtttgacatgatcatcgacaacatcagtggggtcgtggcagccataagcacaggaatgaccatgttcacattaaggccgatgagcacagcatagaacgatggtgagcactatatggtcggcgagcacatggatggcatgttggagattatcttcgttaagatcagcggccattgccactgtgaccgcatgaacgactgtgaccacaaggatattaatgtctataacaccaataacgtcaacattcaggcgagggccatttggacgattacggccacggcatcatcagcatctacagcgacatcgactgagccatct

SEQ ID NO: 8562 - DNA, 372 bp, Triticum aestivum
  Clone ID: LIB104-049-Q1-E1-A9
gtcattggtgtcggggttgaaaatgaagttcatcatgtgagagaaagtcgggtgagcgttgactaggccaagtgacatgacagtgtattcttatgtaacatatcttgtcctgaaatgccgtcttgggaatatcttgctcacggattcgaatctgatgataacccatacggtgatcaagcttggtgaatacttgggcacctttgagttgttcaaacagctcattgatgttgggaagtgggtatttgctctttatattcttcttgttcattggacggtagtcaacacaaagccggtccattccatccttcttcttcacaaacagaatttcacaaccccatggagaagagctaaggcggatgaaattcattcttt

SEQ ID NO: 8563 - DNA, 406 bp, Triticum aestivum
  Clone ID: LIB104-049-Q1-E1-B11
ccgggccgacggcaaggagaagtacgccctcaacggcgtgtcccacaccgaccccgagacgccgctcaagctcgccgagtacttcaacgccaccaagggagtgttcgagtacaacctcgtcaccgacacgccgcccaaggagggcacgcccatcaaggtcgcccccagcgtcatcaccaccgagcaccgcacctacattgagattgtcttcgagaaccccgagaagagcatcgacaccttccacctcgacggctacgccttcttcgccgccggcatgggaccggggctatggtcggtggagagcaggaagacatacaacctcctggacacggtgagccggcacaccatccaggtgtacccgaggtcgtggacggcggtgatgctgacgttcgacaacgccgggatg

SEQ ID NO: 8564 - DNA, 382 bp, Triticum aestivum
  Clone ID: LIB104-049-Q1-E1-B2
gtccatagttgatttttacaatgctcttttgcttcactaatatttgttagagcgtgggcatatcttttgtaaaaagaattaaactatcttgcttcacttatatctattcagagagatgacaggatttggtcattcacatggttagtcataaaatcctacataaaacttgtaaatcgctgaatatgatatgtttgattccctgcaacagttttgcgatataaagatggtgatattagagtcgtgctactggttagttgtgcgttgtagaaatacttgtgttgaagtttgtgattcccgtagcatgcacgtacggtgaaccgttatgtaacgaatttggagcatgaggtatttgttgattttcttccttaggagtggcggttgg

SEQ ID NO: 8565 - DNA, 389 bp, Triticum aestivum
  Clone ID: LIB104-049-Q1-E1-B3
cccctgaaagagagagatcaccgggttatatctggcacttggaagggtgtgttttattaagtatccagttctagttgtcataaggtcaaggtacaactccgggtcatccttttaccgagggacacgactattcgaatagataaacttccctgcaggggtgcaccacataacccaacacggtcgatcccatttggccggacacacttttctgagtcatgcccggcctcgtaagatcaacgcgtcgcagccccaccaaatttccgccgaagcagaaaaagcatcgtctcgtctcgtctcgtcgaggaatcaacagccatgggcggcggcaacgcgcagaagtccaagatggcgagggagaggaacctcgagaagctgaagggcggcaaggg

SEQ ID NO: 8566 - DNA, 400 bp, Triticum aestivum
  Clone ID: LIB104-049-Q1-E1-B4
ccgggtcgacgggatgcaggaattcctcgtcgaattccgcgggcccgaagagagtctctaccaaggaggtgtatggaaggttcgagtagaactgcccgatgcgtatccttacaggtctccgtcgattggtttcgttaataagatatatcacccgaatgtcgatgaactgtctggttccgtctgcttggatgtcattaaccagacatggagcccaatgtttgatcttgtcaatgtgtttgaagtcttccttccgcaacttttgttatatccaaatccctctgatccattgaatggagaagctgctgcactcttgatgcgtgatcgccctgcttatgagcaaaaagtgaaagaattctgcgagaaatatgccaagccagaggatgcgggtataaccccagaa

SEQ ID NO: 8567 - DNA, 372 bp, Triticum aestivum
  Clone ID: LIB104-049-Q1-E1-B5
cggaaatccacaacgtgtccacggagccggcggcgcaacaggaggtggagctgccggagggcacccacccggcggtggccatgctgacggtgagcacgctgccgatgctggcggagctgcataagatggagcatgagatcagctcgcccaccccgcgcaagggctacatcaaggctttctgatccgatcgagatgaccgatgcacgcacgggcgcatgcattcaggagatgaatcaatcgctaatgattggcaaaccgaccgccagcagagatacgtttatatagttcttaatttcagtcgttcgtttgtaatggtctgtactagtagcacagtcgtgtgtgttgttgtcatccatgggtctgatataccgg

SEQ ID NO: 8568 - DNA, 367 bp, Triticum aestivum
  Clone ID: LIB104-049-Q1-E1-B6
ccatgagtgatttttacaatgctcttttgcttcactaatatttgttacagcgtgggcatatcttttgttaaaagaattaaactatcttgcttcacttatatctattcagagagatgacaggatttggtcattcacatggttagtcataaaatcctacataaaacttgtaaatcgctgaatatgatatgtttgattccctgcaacagttttgcgatataaagatggtgatattaaagtcgtgccaatggttagatgtgcgttgtagaaataattgtgttgaagtatgtgattcccgtagcatgcacgtttggtgaaccgttatgtagtgaagttggagcattaaggagttgttgattttcttccttat

SEQ ID NO: 8569 - DNA, 378 bp, Triticum aestivum
  Clone ID: LIB104-049-Q1-E1-B7
cggaattagaagttgtaaatatgcattgttgtatcgcgacctgaatgaatgaaataaacgaaataacgctcttgtacaaaaaaaaaaaaaaaaaaaaaaaaaaaaaaaaaaaaaaaaaaaaaaaaaaaaaaaaaaaaaaaaaaaaaaaaaaaaaaaaaaaaaaaaaaaaaaaaaaaaaaaaaaaaaaaaaaagggccccccaaaaagattaaaactaaattacccttaaatgcaaattaaaaacccttcaaaaggttaaccaaaattaaattaaagggccttcttttaaaaaattcgtaacgggaaaaaccctgggttaaccaaattaaacccccttgaaaaaaaaccccctttcccaaagtgggttaaaaccaaaaa

SEQ ID NO: 8570 - DNA, 397 bp, Triticum aestivum
  Clone ID: LIB104-049-Q1-E1-B8
cgggggctaataaaagaagtaggaggtgtggagacagacttaggaaccgaaaggttttaggcttagtagaattaaaactgagtttgtgaggtgtggtttcagtactactagccacaaggaggaggttagccttgatgggcaggtgatacctcagaaggacaattttcgatattaggggtcaatgctgcaggatgatggtgatatcgatgaagatgtgagccatcgaatcaaagctggatggaagaaatgccgccaagcttcctctgtgacaatagtaccacaaaagctaacattgcaggttctataggacagcgattcgacctgcgatgttgtatgaagcagaatgttgccaaataaaaggcaacatgtccaacagttaggtgtagcacagatgcgc

SEQ ID NO: 8571 - DNA, 375 bp, Triticum aestivum
  unsure at all n locations
  Clone ID: LIB104-049-Q1-E1-B9
agaggttacacggaaggatgacgacagtaattaacatgtgtacatatatcaaaaccatggaagcatcacattaactatttcagctacgggcttaatcaatatatatttacctgaccggactcggttcggtcaatggagcagtctgcacggtcaccatcttgtacctccattgtgtcacctgagcactcggcagggtctccttcttgtacctccactgtgtcaccgaacccatcatgaaaatagtcctcttcttgtaccagcattattggcccgaanccattattagcatagccctcttcttcagccagtccttccagctgactatcactgtcgatgacaaatgacgcaacttcatcacttccatttgcgattatg

SEQ ID NO: 8572 - DNA, 399 bp, Triticum aestivum
  unsure at all n locations
  Clone ID: LIB104-049-Q1-E1-C1
tcgacgggacagaggcagagcttgaaggtggttcatagcacggtgctcccctcccttgctctgcgttttcgttgtggtgaagatggcgatatcgatggagcgcaggaagatgaagcccgtccttgctctcgtgctgctgctgtcgtgccatcttcttcttccgctggtctcctccgtgcctgtgtcgagtaagtgtttgacctccaaccccatgcacgcatgcatggaccttactttaatacagttcatcttctttcttgggatgtgtatgtgcatgcatgcatcttaattttgagccttgctctcggatgtangaagcgtggccttgggaaatcatctagcctcagcttctagtctaactctggaggcggcgcctgttcaggtcaatctctcactcta

SEQ ID NO: 8573 - DNA, 411 bp, Triticum aestivum
  Clone ID: LIB104-049-Q1-E1-C11
ccgggccgacgggactcaagatgtttcgagaatccaaatccgacgtacttattctgtatttgatgaaatgacaggataattatggggtagtttttgactgcgttgacatttacaagcagcccgcattcgatcaccctctcctgaagaaccacatactacaggtcaccattctatactttctatctttactgtcaaaaaattgtaggaatttttgttgctttttgaaacatggtacgaattcttgatgtaatcagtttttttagtcatcgatgtcagatttacagatctatccgcccttgtattagactctgacgtgtccttgtagtattcccgagcactgtggttgatacggcacataccatagcaaatggctctcgaaaaaacaacggcactatagttctatttcccact

SEQ ID NO: 8574 - DNA, 425 bp, Triticum aestivum
  Clone ID: LIB104-049-Q1-E1-C12
ttcccggttcgacctccgcggacacggtgcagcgcatgatggcggagatcgacaccgacggtgacggcttcatcgacttcagcgagttcatctccttctgcaacgccaaccccgggctcatgaaggacgtcgccaaggtcttctgaatcagttcatttcacctcagccgtccgatccaggagccgatccatctacgtacggcttcgcatatcaatttcatgcaactacctactccggtcccgatccagcctcagcttcacctgaggccggccctaattttgtttgatcatttttttttgctaccagtagtaactagtgatgatcactgttccatcatttatttattttatatcatcacaagtttcttttctttctctacctttttgtcgatcgtcggctccagctcgatccaacgatccatgctg

SEQ ID NO: 8575 - DNA, 395 bp, Triticum aestivum
  Clone ID: LIB104-049-Q1-E1-C3
cggggctttgagaggttttgagaggggttttgaggggttttgagaggttttgactgattagggttgagcataactaattcaaaaaaaatcaaaaaaatataaaacttgtgcacatagtcttattatgtcgtatagtaacgagaaaaaaaatataaatatggtttacatacatttttacgaaaaatccttcacaaaattgttattcctcaaacaatgtagtatggagttgaagggagagagtagtgggcacccgagagtaggtggagttttaaaaatgaaaagtgtgaaaacctcaccaaaacttcattttggattgactaagaaagatctgaacttacttttctcattttcatgttttaaacttgttttatatataattttctattaaaccttgt

SEQ ID NO: 8576 - DNA, 397 bp, Triticum aestivum
  Clone ID: LIB104-049-Q1-E1-C4
acggggacccacaatcatccttactctacacaccttttgagagaatcctacattattagaatttgctagaatatgctatgtgcttcacttatatcttttgagcttgatagtttttgctctagtgcttcacttatatcttttagagcacggtggtgacttatttttgtagaaattgctagtctctcatgcttcacttatatatttttgagagtcttttagaacagcatggtatttgctttggttataaaattggccctagaatggtaggcatccaagttgggtataataaaaactatcataggaagtgaattggatgctctggtcaatttgatacttaataattgttttgagatatggaggtagtgattttaaagtcatgctagttgggtgattatga

SEQ ID NO: 8577 - DNA, 396 bp, Triticum aestivum
  Clone ID: LIB104-049-Q1-E1-C5
cgggtcgacggggatctaaacagtactattcttctgcttatgtaaacaccttggtgtacaaccatgtcagtaagaccctgttgctttttttgatagcattccagtaaccaccgatggacgagaactttgcctattggtccgtctcgttcaatgagcaggaaaatggttctcttcgtccctcgcccttggtaccaatggttgttgccaacataatcgatagtctatcctctggcatgccttgcttacatgatcatgcaagacgtcatcccccttccgacttttaacccacatggtgggcccataacccacaatttcacaggatcgaaacctgactctcctgtacaccctgttgtcaaagttattcccacgtttgactttgacgtaattcacgggcca

SEQ ID NO: 8578 - DNA, 389 bp, Triticum aestivum
  unsure at all n locations
  Clone ID: LIB104-049-Q1-E1-D1
cgggacagggctagaatacctgcagcacgagaatttcatggaatgagcagtcagttagtcaaggcaatgccgagtcttatttttacaaaagtccaggaagacaattgtacttcgtcaacatgtgccatttgcttggaagactacagtgttggtgaaaagataagggtgctgccttgtcgtcacaagttccatgctgcttgcgtggacctgtggctcacatcatggaggacattctgccctgtatgcaagcgagatgcaaatgctggaatgtcaaatttccctccatcagagtctacccctttgctttcttctgctattcccttgccagctgaatcgacagctttgtcttcttttcgttcattggtancagcatctcctccaaggacaat

SEQ ID NO: 8579 - DNA, 356 bp, Triticum aestivum
  Clone ID: LIB104-049-Q1-E1-D10
acgggaatgttgatgaggcttgcactggtgtgaatgttgcggttatggttggtggattccccaggaaggaaggaatggaaaggaaggatgttatgacgaaaaatgtttcaatctacaaagctcaagcatctgctcttgaagctcatgcagcccccaattgcaaggttttggttgttgccaacccagcaaacaccaatgctctcatcctgaaagagtttgctccatctatccctgagaagaacatcagttgtttgacccgcctagaccacaacagggcactcggtcagatttctgagaaacttggtgtccaagtttctgacgttaaaaatgctattatctggggtaaacactcctcc

SEQ ID NO: 8580 - DNA, 425 bp, Triticum aestivum
  Clone ID: LIB104-049-Q1-E1-D12
cccgggtcgacggggacgatgacttctgtcagcacgacgacgtgatgacggttttggtgatgtgaacgccatcgccaaaaatgagccatgggtacatgctaaacacgtcacataatgtgtcttcataactgatccgatcaatcacagccgtgttgtcgtgaggagaagcaaaaggagcattgccgaaatggatggagtcgccaacgaggaagaccacgaccagtacggtgatccgatgagggaagatgatgctgatgacgatgaaacatacgtcaaaagaagaacaaagattacattacctacgaaagatcgtaatccctggagaaggaaaactcacgaccatgggctcaattattcgacaatgaacaaaagagggaagaatattagtctaaagcgtcatcgtcgcccaagctgacaaactaatc

SEQ ID NO: 8581 - DNA, 311 bp, Triticum aestivum
  Clone ID: LIB104-049-Q1-E1-D2
gcagagtaaagtcagggggcggcccgaaatagaaaaacccccgggttgccccaatcaattcggttggaaaagaattggcgagttgccaatagccggttgcaaaaaaaaaagttcaaaggtggctggcctttgaaaaaaaattaacgggtgagaagggcggtttgccgaaaattcggtgggaaaaaacaagacaaaacaaatgtgtgtccgagctggcaaaagtgtgtctcgtacgcgtgtggtgcgcttgaaggattgcaaagagcgagagtgttgtctcaggctgtgcgtgcacacgcgtgtggagaaca

SEQ ID NO: 8582 - DNA, 373 bp, Triticum aestivum
  Clone ID: LIB104-049-Q1-E1-D4
cggcagtaccacaaagagctaccagcgcgagacgtggggccgcgtgctgaacgtgctccgcgacgacggcgggatcacggtgaaggggcacgtgcagaagccggtgctcaaggaacggttcaagcagttcaacgcggccatacacgagatccagcggacgcagggcgcgtgggtggtgagcgacgagcagctgcagtcggagctccgggtatccatcaccgccgtcgtggtgccggcgtaccggtccatcctcggccgcttcgctcagcacttcaccgcggggaggcagacggagaagtacatcaagttgagcgcatacgacctcgagggcatcatcgaggagctcttcgagggcagcgccgggtccaagtca

SEQ ID NO: 8583 - DNA, 315 bp, Triticum aestivum
  Clone ID: LIB104-049-Q1-E1-E11
acgggaagtgtaagagaggagatggtcactatccgaggtcccaggaccagccatgacgtcaagctgctgcagcgtggagtcaggagtgtgttcgcaccccggcgtgtcccagtatgtgctttggaagactggcgtcaatctcaacagacccttatgcgtccacattatttgcttcacaaacagatagcatctctctgcttcgtctctggagtcacaaagctcgatgacagctagatacggatgatttacaggtttggagccaaaatataattggctagtctttttgaacacatgatgtaacacaaaagttattat

SEQ ID NO: 8584 - DNA, 409 bp, Triticum aestivum
  Clone ID: LIB104-049-Q1-E1-E3
attcctaagtcgacgggcccaatgaaatgccttaatctactttgcttgagaataataatgaatctatggatgtgaattttgttggtaggaatagttttggaaacaacacttatagagggaattttaatcctaggccttatcctagtaatccttctaataattatggaaattcctacaataactcttatggaaattttaataagatgccctctgaatttgagagtagtgttaaagagtttatgaattcacaaaagaattttaatgctttgcttgaagagaaattgcttaaagttgatgatttgtctaggaacgttgatagaatttctcttgaaattgattctttaaaacttaaatctattcctcctaagcatgatatcaatgagtctctcaaagccatgagaatttccat

SEQ ID NO: 8585 - DNA, 409 bp, Triticum aestivum
  Clone ID: LIB104-049-Q1-E1-E4
ttccaggtcgacgggacgaggaggaggaggaagacgcctaggtctgcctgccgcctcgtagtttaggttgtttttatttttcttaaatgctaatgtggatgcgtggactctcgccggccttcgtggccggctgtaatgtttaattaatgatgttttttaagtatgcatgtgttctatttttttctagagccgtcaaaatggataggcctagcgttgagcgcacgtgccgacccaaacacggaagcggacatccgtgtccgcctattcgatccaaacggacgaaaagcggacaaaatcgctgtccatttgagtcgatccgttggagttgctctaagggcctattcggtttctctcggctcctgcgactcaactcccgaagcggagcaagctacttcagcttttttatgga

SEQ ID NO: 8586 - DNA, 368 bp, Triticum aestivum
  Clone ID: LIB104-049-Q1-E1-F1
tcgagggggggaggcgccttagcggggatggaagcttggacgagattatgtgcggaaaaagatggagaagcgaatatgtgctgcgggaagtggataggtgatgatgactacagcatgccgcttgacttacgagacacataccaacaacgtagtgtcatatcgatgctagacaacttgcttgagtgatcacagtactggtactccctacagtacctactacagtactatgccctagcttgctagagtagagtagtagagtaggactctgctctactactagcaccggaggagtagtatattctaatctaaaatagttacaaacttcaatgcccgatcgtggaacgactacgaaccatgctcaaagaccg

SEQ ID NO: 8587 - DNA, 423 bp, Triticum aestivum
  Clone ID: LIB104-049-Q1-E1-F12
ccgggtcgacgggaggcaggatggatctgcgcacggaagcttccgatctgaccggctggcgtctcagatctgctgctggtctgatgctaaacggcggatctagatgttcccggcggtctcggtatgttgcagcggcgggcccggaggggctctctccggcgagtacgtgggatcccgtctgctcctccacctcgtgcgacgacggccgacggctctttgtgttgataattattcgatgctatgtcgataattattagatctaagagatcggaggtgacgtaaggtaagaagatgtagcaagcgaggtgcttgtggagaggtcggaggagagtgaaaaaaaagagatgtgaacatctagaggcctttgccatgttgggtgcgctcgcatggcaggccgccaccataataaagatgtttttttgt

SEQ ID NO: 8588 - DNA, 381 bp, Triticum aestivum
  Clone ID: LIB104-049-Q1-E1-F3
cctaaagtgagtaatatgacacatacaattcgtccagttgcttctcgtgggttttcataaccctgctgcgcaaaaatgggatatgcatttgagataaatgtccgagttagtacgagagtcggtgatcgatacagaggtcgatcgagttagctgttcctttacccaagaaaaagtatttcgattttccatgtccaatcgcagatcccagaatttctacaagaaattagataggtagctaagctaatctagttccctatacagcaatcggttgtcattctactgcaacagttgtactgcaatgatgaataccttaaagtaggtataaatagaaagaattttggcaaaatggaaaaggggtttctttcgaaaagaagatgcttg

SEQ ID NO: 8589 - DNA, 382 bp, Triticum aestivum
  Clone ID: LIB104-049-Q1-E1-F4
gtcgacgggccggccttggcggaggagcgggagcagcttgctgaggagcggaaggccttcctcctcgagaaagctgaggctgaagagcagcagcggctcaccggtgagaagctgtacgcgcgagaaggcgagctgactcagcggaaagtgaacctcgacagccacgaagaggagcttgccgcgcgcgaacgggcacttggcgggacgctccaagaggcaaaggatgcggctgcggctgccgaggccgccaagaaagaattggaggcaaaggtggcgcatctagaagctaatctgaaggttggtggcgaagagcttgccgcgctcaagctagagcgcgagaaggacgcccttgcccatggtgagctgcagggccgactcgccg

SEQ ID NO: 8590 - DNA, 399 bp, Triticum aestivum
  Clone ID: LIB104-049-Q1-E1-F7
cgggtcgacgggatatccgaaagagaaggaagtgcagaatagatgtgtgaatctgaacataaaagaagagttagtatgtagttcgagcacatcaaatacaacaggtttctcaagctctacatttagtgctttacgaaagattgacaaggacaagatggccatggcgttggggtccctgcagacaagtaatccaactatttcaagtttccagtgcacacagtccttgagtcattcatctgaattatcatgcccttctcgaatatcaacaggatctagcctaccttccaaaactactagggaactgtttggcattgagactgaatactgtgtggccaaggcttcatgtgcccaggttagtcaactggggaaaccttcttcaagtcaatccaatgaagtctc

SEQ ID NO: 8591 - DNA, 430 bp, Triticum aestivum
  unsure at all n locations
  Clone ID: LIB104-049-Q1-E1-G1
acgcctgtcggtacggctcctaaattcncaggtcgacgatgtaaggcacacgtaccggcgggggttccgagctgcttggcggcgtagtagtacggtggtttgtaaggctccggccacgacgccgtctgtactgtgtgcgcgcccgtctggtggtgtccgcgatggtcgtgccgaccgcctcaaccgccatgacctccaagcccaacgccaacaacctaaccaacgaagaacaaccccttcttggacttcccctcctttggcggcctcgctttgacgcgcgaatttttcgcgtcgtcgagctgatcttcccgggcaagcgtgatgctcagatcctccggcacctccgtcggctccatctccgacacgttctccgacggttccatgcgtcggcgacggaaggaaggcgagagtgaaagaaaagagcgggaat

SEQ ID NO: 8592 - DNA, 361 bp, Triticum aestivum
  Clone ID: LIB104-049-Q1-E1-G11
ccgggtcgacggggaatctgaggcagagctgtgaggaaagatgatcttatcttgccacggcggatatcttgcctctttgacgtgcagttctagcgcagcagaaggtttggacagatacatggttctgtttctgctccggcagccaaagcaaaaccacagatacggtccttgtacatctctaataatttgacctgaaataattcacgatactgcatctgtagtttctccacatattgtgcgagtaatgacatttgtatacttaaataagtgatggcatttcatccgtcaaaaaaaaacaaaaagataaaaacataaataaacatacaaaaaaaatcaaaactcttccaaaatgaaagataaa

SEQ ID NO: 8593 - DNA, 420 bp, Triticum aestivum
  Clone ID: LIB104-049-Q1-E1-G12
cgggccgacggagtcgtgaattgcctgagccgctccgagcaccaaccttctggctctcgagttgaggtaagcacgtgcacactgagaaaacagctcgtggacttcgtcgaaggcaccgagggtggtctcaagagaacaccacgaactgtcgtttaaagcagccaaccgcttcgcggcattggtgtgtgagacgttgatacgtctccaacgtatctacttttccaaacacttttgcccttgttttggactctaacttgcatgatttgaatgaaactaacccggactgacgctgtttttagcagaactgccatgatgttgttttatgtgtagaaaagaaaagttctcggaatgtcctggaaatccacggaggcactttttggaattaataagaatttttggcgaaagaatcaagaccagggg

SEQ ID NO: 8594 - DNA, 304 bp, Triticum aestivum
  Clone ID: LIB104-049-Q1-E1-G8
attccagaggtcgacggggtctcggcagaacactcctttgaacacggacagttacacttgagcaaatcatctgcaacataccatcgaccatatgatggctctgcattttctgactgaggtcttcgatacatgcaagcatagaaccattgatcagtaacttcatgcctagtcatcagtgggaaattcatgtctgcaatacctccacacaatcgctgagtatcattcatcacagcatactcaggtatcactacatcagagttgaaacataactctgtccaatatcatcggttctaccgaatcattg

SEQ ID NO: 8595 - DNA, 426 bp, Triticum aestivum
  Clone ID: LIB104-049-Q1-E1-G9
ttcccgggccgacgggaaaggaaaatgagaggcgaatggcaaataatgtaatgcgatggagaagagtttatgatgggtacgtggtatgtcttgacttggcgtagatctccccggcaacggcgccagaaatccttcttgctgtctcttgagcatacgttggttttcccttgaagaggaaaggttgatgcagcaaagcagcataagtatttccctcagttttgagaaccaaggtatcaatccagtaggagacaatgcacaagtcacctagtacctgcacaagcaatcaagaaccttgcaaccaacgcgataaaggggttgtcaatcccttcatggtcactcgcaaaagtgagatctaataaagatagtaaagtaaatattttttggtatttttgtagtatagattggaaagtaaagattgcaaaatag

SEQ ID NO: 8596 - DNA, 395 bp, Triticum aestivum
  Clone ID: LIB104-049-Q1-E1-H1
cggggaccgtcgagtattatattagtatttgctttttagtttaccacaatcatccttgctgtacacaccttttgggagaagcctatttgattagaatttgctagaatactctatgtgcttcacttgtatcttttgagcttgatagtttttgctctagtgcttcacttatatcttttagagcacggtggtgtcttaattttgaagaaatttctagtctctcaagccttcacttaaaatctttttgagagtgttttagaacagcatggtatttgctatggttatacaattggtcctagaatggtaggcatccaagttgggtataataaaaactatcataggaagtgaattggatgctatgatcaatttgatacttgataattgtttttacatacgga

SEQ ID NO: 8597 - DNA, 421 bp, Triticum aestivum
  Clone ID: LIB104-049-Q1-E1-H10
cgggtcgacgaaaacccctacttgccagagcaaccaggcaagccccccctttgatcatcccgatatcgcccattccattctctcatgcttgcattagattttgctattgttattgtttgctcctattctgatgcatagcctacttttgtatctgctgttgtaccttacctgcttatccttaactgcttagtataggttggttagtgatccaccagtgacccccaccttgtcccagttgccccgctttatgttcgaagacccgatcaacgggatcgaagaccaggccccggcaacgcacatcactctccccttagttgctcgacactactgggtaactaccgagtgccgagggtgagacctctacaacacttctgatgttaaccctgtagtgtagctattcggtcgtggtcatcgagggtga

SEQ ID NO: 8598 - DNA, 162 bp, Triticum aestivum
  Clone ID: LIB104-049-Q1-E1-H4
ttatgtttggtggttcctttatgcagactgtgatcctgttgtgggttaccgtgaggaccgactggaacatagacgtggccgtcgcgatgacaatattgatcaagtgggaatgcaccactatgcctctattagcaggccaagaatgaatcagtggatcctgtg

SEQ ID NO: 8599 - DNA, 289 bp, Triticum aestivum
  Clone ID: LIB104-049-Q1-E1-H6
gacaaagtgcacgtggactagtcggataaaaagctcttatatgatcagcagatctacaagatcaacacttaactacacattcatattagatatgaggtcgtctgcattatcccatagattccattaagctcacggtgctatagagaataatctgaggctgaacggatacataattcatcttgagtctgatgacaggggactgcactacacaccactagcatcataactatgatgtggaacagtatcctgattaaactattttctggattatgaatgaattctggaacat

SEQ ID NO: 8600 - DNA, 388 bp, Triticum aestivum
  Clone ID: LIB104-049-Q1-E1-H8
attccgtatcgacggggaacaacgacaagaaaggattctatcaatgtatcatcagtatcaatcactacatgacaccacacaacagatatgctgctgtcaacagtcctctccaaaattaacacggcatttaccgtataattacaccattgctgctgtcagcattgctctctaaatagacactgcaattatcatgtacatcattgctgctgcaatgaaccattaagaattatttaaaatctagcctaccatctgcgttgtcgtcaacagagggttgaggcggagttacaaaatctgtatgagaaaccgagggattgtccgagtcagcgacatctttgttatcttcagagttgtcagaagcagctgagatggcgtcacctgattctgaatg

SEQ ID NO: 8601 - DNA, 409 bp, Triticum aestivum
  Clone ID: LIB104-049-Q1-E1-H9
cccgggccgacgggggggtaaaagcatgtggcgtcttatttaaccttgggctcaactatgcgtccgcgacatcatcgtcggcgttgtacaatgttcaacccgtggttaccttcattctggcggtcataattgggatggagtctatgaagctgaagaagctccatggcaacctaaaagtggcaggcattctctgctgcgtcgccggcgtcacggtgctggccttctacgaggggccaatgttcagatctttcaaccatcaccggctcttccagcacggcagcagcagcagctcctccggagcaggcacctactccaagaaccagtgggtatttgggattttcctcatgacactctccaacattttagcaggcttgtggaccgtgcttcaggggccactgatagaggacac

SEQ ID NO: 8602 - DNA, 391 bp, Triticum aestivum
  Clone ID: LIB104-050-Q1-E1-A1
gggccccgagaagcatgcgcgtaggactttgtttcgatgactaatagatttctgcaataagtatgtgagttctgtatgactaatgttgggtccatggattatacgcactctcacccttcgaccattggtaacctctctagtgcccgcaactttcgccggtagcttaaacccaccatatactttcctcatcacagccaccatacctacctattatgacatttgcatagccattccaacatatattaccatgcaactttccaccgttctgttttattatgacacgcttcaacattgtcatattgccttgcatgatcatgtacttgacaccgtacttgtggcaaagccaccgttcataattccttcatacatgtcactcatgattcattgcaca

SEQ ID NO: 8603 - DNA, 356 bp, Triticum aestivum
  Clone ID: LIB104-050-Q1-E1-A10
tcccgggccgacggggaccacaaggagaagaaggacaagaagaagaagaaggacaagaagcacggcgagggccacaaggacgacgacggccacggcagcagcagcagcgacagcgacagcgactgagccagctccggccgcgctccggcagcagcgtgcagtgtaggcgagatcgatgaacgcttgggagaagtgtggcatacatatatgttgcagggtttggagcgtgtggtagcatatgtatgtaatgcgtgacatgtctcatggatcttgtgatgtataataattagccggctgcactgcactgcacggtgcttgtaataataacgttaatgaatcatgttggtattgatgtt

SEQ ID NO: 8604 - DNA, 386 bp, Triticum aestivum
  Clone ID: LIB104-050-Q1-E1-A11
acgagatgtggaggaaacgagacgtatggcacctagtgttcactcgactttatgtgagaatgagttgagagacccgtaattgctacgtttccgaattgagaagcatccactcgtctagtaatacccttatggaccagtgcataccactgtggcatttcgtattcatcataagcagtccaaacctggttttcaataaacaaagcttaagtccgatccgtgtcgaagtcgtaaaaatcagcatatggaacactcataaccacctcattatattcatcctcattaaccatataactagtgttcttgttttcataaatctttactctttttactgcattacatatctttaagttttgaattgtttttgttaaccagcagcaccaactttc

SEQ ID NO: 8605 - DNA, 269 bp, Triticum aestivum
  Clone ID: LIB104-050-Q1-E1-A3
cctccgggtcgacggactgtgtcatataacaatgggctaagtcatccggccctgcccgcccgtcttcttcctgtccgatcgatcccaagcctgcacggtgtcaactttcgttagctttctcgtgtctgttattaaataatacgatcgaatcgtggcctctttggcatgtacgtactatatgatctattttcagttatcgacttgctaatgccggatgaattgttctatctgcatctcgcacttgggattaacctggtcttatgtttctc

SEQ ID NO: 8606 - DNA, 396 bp, Triticum aestivum
  Clone ID: LIB104-050-Q1-E1-A5
tgtgtcatataacaattgtactaaatatagtaaagaaatcttaagatttcgattcccagtaaaaaaaaatatagaatagaaaaatatgggacaaaaaataaatccactcggtttcagacttggtacaacccaaaaacaccattccttttggttcgcacaaccaaaaaattattcggaaggtctacaggaagataaaaaaataagggattgtatcaagaactatatacaaaagaataggaaaaagggctcgaatagaaaaatagaatcagactcaagttccgaagtaattacacataatagaaaaatggactcaggttcaagttccgaagtaattacacatatagaaatccaaaaagaaatcgatacgatccacgtcaaaatccatattggattccc

SEQ ID NO: 8607 - DNA, 403 bp, Triticum aestivum
  Clone ID: LIB104-050-Q1-E1-A6
ccgggtcgacataactaaaaatccaggtggttaaaccaaaatcacacagaaaaagggagtaccttgctctgataccaattgaaagtgcgttatatcgactagacggggtgaataggtgacttttatgaattcttcactgaggaatttcagggtgaggaaattcctaactgaagaactacttgcagcggaataagtactcagaatctatcataacagagcataagcatggtcatcatgatgaaatgaaaaacaagcacagagtacagaaagtgtaaacacaggatacacaggatgaagacaaacagactgaagaaaatgaactgaggaaattgagaaagtcttcagtcaaagtcttcaaacaaatatgaacaagcacacagtacagtaatgaggaaatggaaga

SEQ ID NO: 8608 - DNA, 373 bp, Triticum aestivum
  Clone ID: LIB104-050-Q1-E1-A7
gataacttagcatattagagccaacttaggtaaaatggagccaacctagctaattatgccatctttgagtgaactaagcatattagagctaacttatagctaacttatgtcattttggaagaagaagaagaagaagaagaagactataagcttattatgtaaacttggtcattttgtgctaacataagtaattttggagctaacctataggaaactaaacatagtagagataacttagcatattagagctaacataggtaactaagcatattagagctaactatatatagatcattttggagatctgacatacctgacattgttcagttctcattgttcttctccttctccttcctcagcctgatgcgccaag

SEQ ID NO: 8609 - DNA, 398 bp, Triticum aestivum
  Clone ID: LIB104-050-Q1-E1-A8
acggactaagcaatttagatataacttagtatattacagccaacttaggtaaaatggagcgagcctaactaattatgccatctttgagtgaactaggcatattagagctaacttatagctgacttaggtcattttggtagaagatgaggatgaagaagaatactataagcttagtatgtaaacttggtcattttgtgctaacataagtagttttggggctgacctataggatactagccataggtacagataacttagcatattagagctaacataggtaacgaagcatattagagctaggtagatatagatcattttggggatcggacatacctgacattgttcagttctcattgtgtcttctccatctccttcctcagcctgatgcgccaatagcg

SEQ ID NO: 8610 - DNA, 375 bp, Triticum aestivum
  Clone ID: LIB104-050-Q1-E1-A9
ttagacattttaactatctaattatagtgtatataatctttaaataactaattaatttaacacaaaatataaaaataaaagatcaaaactcagaaactagcctattgaaagtgtcttgaccaaacttgagttcaaaggtgtcaattctatttaaagctaagaaaaacgtatgcatattcaatattcagtatccatcaaattttggtcttaatgatgcgtggttttgagtggaaagtttaagatggactactgttttgtttagtattattcttacattcatggattgtaagaaaactttaatatctttttgctcctcacagggataaaaaagataaagaaaatttatctagaagaaggtgaatgagaaggtgaata

SEQ ID NO: 8611 - DNA, 364 bp, Triticum aestivum
  Clone ID: LIB104-050-Q1-E1-B1
gggacaaaacaattcaccatggtactgcttgatgagatagagaaagctcaccctgatattttcaatatccttctccaaatttttgaagacggtcacctggcagactcacagggtcgcagagtttcgttcaagaatacattgattgtcatgacatcaaacgttggttctacatcaatttcaaacggacgacggaccatgggtttctcaacagatgacaccgaatcaagccgatatgtcgcggtgaaatccctcgtgatggaagagctgaagggattcttccgtccagaattgctcaacagaatcgatgaaacggttgtgttccgtcctctggaacagactcagatgctagcaattctcgatatcc

SEQ ID NO: 8612 - DNA, 258 bp, Triticum aestivum
  Clone ID: LIB104-050-Q1-E1-B11
atttacatgttatttgcgtataaaaccttatatgtgtgtgtgatgaggtgtctatgtgcctataggttggtatcatatccgtcaagcatcaggtatgttaatgactgtcgggagtgttcccccccattgcatcagtctgtttgcgcttgtgaatctgttcagcaggttcaacgagcgatgttcatcaggttcaaattttggtcacgtaaggtttgacaatattcagccattttttaaaatcatcagccgatattttcg

SEQ ID NO: 8613 - DNA, 398 bp, Triticum aestivum
  Clone ID: LIB104-050-Q1-E1-B3
ttcaacgtagagaagttgactcatcaatgaggaactgttgcgatgaatatccaattaggccaatcccattcactttcacacggtatgttgtgtgttgtagtctggtaatattttgttcacttcaatatcaggctgcaatgtatctacctagccaaatggtgtggaatacttaaattttacttggtatatttgtcagcagatgtaacatggaaggtactggcaaagtggcaatatgattggtgttttcttcacaaaggaaaatgatgtccatctggcttcaatgtcacagttactctggaagtctaattcttctgtgttcttgcagcacacacaaaaaggaaaaaagaaaaagacaaaggaaaaaataaaaaaggaagaaaaggaaaaagaaaaagaaa

SEQ ID NO: 8614 - DNA, 364 bp, Triticum aestivum
  Clone ID: LIB104-050-Q1-E1-B4
catccgacgcctgtggacccgcaccaagtagatcgacgtgatcgtgaccggcgccatgtcgcagtacatccagaccctcgagttctacggcggcggactgccgctcatctgcaccatgtacgcatcttcggagtgctatttcgggctgaacctcaatcccatgtgtaagcccggcgacgtcgcgttgaccctcatccccaccatgtgcgacttcgaattcctccccgtccattgcagcaacgccaatgccgggccgagccaccgcgacctcgtcgatctagttgatgtgaagctcggtcacgactacgagctcgtggtaaccaccttctcaggtttgtgccggtatcgtgtgggcgacgttctg

SEQ ID NO: 8615 - DNA, 417 bp, Triticum aestivum
  Clone ID: LIB104-050-Q1-E1-B5
gactacaccaaaacgaaatccaccatctcatcgaaagacgggacacctttgcctttatcaagtggtatcagatttccaggttgctcggtgagattttacagtttttcgtagtttagatcgagtctgttcttcatacctatagtccacgaaaaagccaaaaaaaaattagggttagttcatcccatccgaaccaatctgagccttgcataatcttttctgtatttgctttgttgaatttgcggttgcatcgtcgtgttcagttgctggtcttagcgtctagtcttttagagtttcgagttctgttcacaagttgtcacgccgtcgccgcaccaccatcatcgcccctgccatctaccaccaccgctctgaatccgtatccatataccaccaccaatccgtggtcatataacaacaccg

SEQ ID NO: 8616 - DNA, 428 bp, Triticum aestivum
  Clone ID: LIB104-050-Q1-E1-B8
tccgggccgactaactggttattctttgttaggaaccgtgtctagaattgtctggccgattcttctggctgctgaattatgtggcttaagtcgtcggcatccggcggtcgcacgtaagtgccctggaagttgtcgaggaatgcggcttccaggtcctcccaagaaccgattgagtctgctggcaagctgttgatccaatgtcgggccggtcctttgagtttgagcgggaggtattttatggcgtgtagatcatcgccgcgtgccatgtggatgtgaaggagataatcctcgatccataccgccgggtctgttgtgccatcgtatggctcaatgtttacgggtttgaaaccctctgggattttatgatctattacttcattcgtgaagcatagcgggtgtgcggcgcctctgtattgggctatatcaca

SEQ ID NO: 8617 - DNA, 402 bp, Triticum aestivum
  Clone ID: LIB104-050-Q1-E1-C1
attaaatggggcgctgctaaaatatatgaccggctagggttttgcgggagtattcggcagcttgctggtgtcttatggtgggggtctgagaattttgacaatgataagcaacaaataactgtgttagtggtggttggattgaattttgattctgaagggtggaattgcttggctgtgttcagatgagagctcctttgcaagctccctttcggatagcagctagagcttgaatttcagagtgtggcactaagaatgcttataatgagttttgcagacatgcttgttggttaatttcaattatttctcatgggtatttgtcccagggttttgactgtcaaaacggtttctgttattttgcctgttttcatcagtgtatactgaataaattgtaatgggaaaacc

SEQ ID NO: 8618 - DNA, 390 bp, Triticum aestivum
  Clone ID: LIB104-050-Q1-E1-C2
acgggccaatctagtaagcaaacaagatttgtaagaattcttatgagtgtgttgaatactaagaaaagtttgatacttgataattgttttgagatatggaggtagtgatattaaagtcatgctagttgggtgattatgaattcaaagaatgcttgtgttgaagttagcaagtcccgtagcatgcacgtatggttaaagttgtgtaacaaatttgaaacatgaagtgtacctggcttgtgcatccttatgagtggcggtcggggacgagcgacggtcttttcctaccaatctatccccctaggagcatgcgcgtagtacttggtctttaatgacttctaaatttttgcaataagtatatgagttcttttgaacaatgttgagtccatggat

SEQ ID NO: 8619 - DNA, 414 bp, Triticum aestivum
  Clone ID: LIB104-050-Q1-E1-C3
acgggcataataatgtacgaagcagatttgaatcgaccaggaatagctagatggcatggcatgatggatgccacagcacacagcagcaccagcagtacagtgttgtcgagcgaacgcgtccatgcatgtgcggaccatgctctgcctcctctgcttcagcgcccgcccaagtgtcggcagcgccgtccagtccgagaaacatggatggatgaatgattggccacctttaatcaatttgacactgttcactcattcattagccgtcgctttttggtacgtgccactgacacgtgcactgtgtacatgtatggcgcaggacgctcggcgcgtggccggtggcgacggtgtcggagcgcgagcggagggcgacggtggacgggccggtgtgcggcggctcgccgttggcggtcaccg

SEQ ID NO: 8620 - DNA, 317 bp, Triticum aestivum
  Clone ID: LIB104-050-Q1-E1-C4
gccaggggaggatgaagcttatggggacgaccgtgctgattacaggaaatctgaacccactacgtacatcaatgctcccttggtaagggttcttgcctactttgttggcaacccaaacccaggccatatcagacactgagcataagcacttcgccgtgtagatagataacagtgacagaatgctataaataggtactataaaggagacaaataggtttgtgttttccttagatgacacgacatgttcataggagtggattgcatagcatgggttctaatgttccaccaataatgagaacctaactttaatgattaac

SEQ ID NO: 8621 - DNA, 219 bp, Triticum aestivum
  Clone ID: LIB104-050-Q1-E1-C8
tctggcagtgggcgggagatcggtgcggtgactctggtggtgtatacggcgaccgcgagtaagtacacggtcaggcacgtcgagctccggtgaacatgggttgctgtcggttatcctctttggtgtatatgcttcgtctacagagctactttgacatgtttcaagtccgcccagtttcctgaacttgtgtccatttgcataccgcgtccctttggaaca

SEQ ID NO: 8622 - DNA, 388 bp, Triticum aestivum
  Clone ID: LIB104-050-Q1-E1-C9
atcaaataactagggagaaaactagcaagaatgatccacacaagcatcaaattgtcaaaatgctacaaaaggcaaatcgtcaattcttcatgatgcaattgtgccaggttatttgttacttttctactcatgattaatcaagtggacctagtatccgagcagatgacacagttatgatccacaagaagctcaatagagaagcaagcataaagggaagattagtaagaccactgagctcacccgtttatgagaactttcgagccaatacttattaagcttggagtaacttaatttgccagctctcatggcagagatagcatcattatcctaaaataagccaaaagaaacaacacatgtcaatctacaattcctttttagttgaatttgt

SEQ ID NO: 8623 - DNA, 375 bp, Triticum aestivum
  Clone ID: LIB104-050-Q1-E1-D11
gcaatctaattaatctgagtaagtttacaagcgaaagatttctcatctctatgggattaaatcccgagatattccaaagaaaaaaaaaataataataataaacgattaaattatggaagtaaatattcttgcatttattgctactgcactcttcattctcgttcctactgcttttttgcttataatttacgtaaaaaccgttagtcaaaatgattaatttgaataaaattttactatcaaaaaaaaaaaaaagatttcaatttctcgtcttaaatgaaaggaacgcattagactcagtagtagtatcctaaggggtccgctagtatggtagaaagagatctctttcaaccatactagccattatggttattgtaa

SEQ ID NO: 8624 - DNA, 404 bp, Triticum aestivum
  Clone ID: LIB104-050-Q1-E1-D3
gacgggcagaaggacggcgaaaagaaggaggagggcgacggcaagaaggacggcgacgggaagaaggacggcgacaagaaagaggagggcgacggcaagaaggacgaccagaagaagcccgccgccgtggccccgctgccgttcccgcaccacatgccgctgccgcaccacatgccgccgccctacatgttcaacgccgactacatgatgaaccagtaccggccggcgccgccggcctacccgccgccgtacgtgccgccgcagcactactacgtgcggaacatgagcatggaggagaacccaaactcgtgcgtcatctgctaagtcaaagtcgatccctcgatcgctcgcgtacgtacgttccgtggggcgaccatgcatgcatctgtgtatagtagtatttt

SEQ ID NO: 8625 - DNA, 417 bp, Triticum aestivum
  Clone ID: LIB104-050-Q1-E1-D4
gacgggctgaaccacttccagacggaggccaactacgtgtcagcgcgtaagacgaaacagaattcctacaaatccaagccttgggacaagcccgccagaccgagtcgctagactttgctgaaagagatggcgccccgaggctccgtagaaagagaagagaagtgttgttgtatcgccaatttttcgaaatataccgtctgctgttcctttttttcccgccttgttgctccttttttttcaccttgttgtttgactagacggctcgaaatagacagaactcttgatcggggcctgtatttaattgtgagattctttgtagcgcagccggagtagtagaacatgttgccgtttttcgcagcatttttcgcagcatttttcattcttgtttccccagcaacatagttaagatttgttatg

SEQ ID NO: 8626 - DNA, 410 bp, Triticum aestivum
  Clone ID: LIB104-050-Q1-E1-D5
acggacgcttgaacaggataccaagcgagtgtttaggatcccacacagggcatttcttgacatgctcctagcacaccttgggctaatcaccggctcagtatgatcgtgttgtacatgaggacggcaagatctgtgtgaccatctttttcaacacctgtacattggatcttggaggaccaatcagtatgaacgcgtcgtgtcatcattcctcctggtctacattatgcccagacatgcaaagttgtggatcgtctgtaagctaccatttgctttcgtatgtcctatgtctgtgatatttgctactaaacctattgtgctacgtgctctctatgttcgtacattgttaggtggctccttattgtgtgcatacaaccaaaccttacttctgaatgattcttcattagtttttt

SEQ ID NO: 8627 - DNA, 428 bp, Triticum aestivum
  Clone ID: LIB104-050-Q1-E1-D7
ctcccgggccgacggataatacatttctcatagttgcggatgcttgcgagggggttaatcataagtaggaggtttgttcaagtaagaacaacacctaagcaccggtccacccacataccaaattatcaaagtagcaaacacgaattaagccaacatgatgaaagtgactagatgaaattcccgtgtaccctcaagaacactttgcttatcataagagaccattttggcctgtccttttcctcaaaaggattgggctatctggctgcacttttgttactacaatcgttacttgctcattacaaattatcttgctatcaaactactctgctacttacaattttagcacttgtagacattaccttgatgaaacccacttgtcttttccttctgctccccgttgggttcgacactcttacttatcgaaaaag

SEQ ID NO: 8628 - DNA, 416 bp, Triticum aestivum
  Clone ID: LIB104-050-Q1-E1-D8
ggtctgggcctcccgggccgacgaaaagctcaacaagctcatctggagcagtgggatcagaagcgtgccccgtagggttcgcgtgaggattgcccgcaggaggaacgatgaggaggacgccaaggaggagctctactcactcgtcaccgttgccgaggtgcctgctgagggtttgaaggggctgggaaccaaggtcgtcgatgacactgagtagactcttttctttatctacatcgttagaatgagctgttatttggaattgcaccagcatgctttttgtatcccgcagaagttttggagtatggaatatcgggagctatctattttccttcatctaaatcttgatgattggttttgtccttcatactgtgctcgttattggcgtcaatacaggatgtgcagttgagcttgcaaaa

SEQ ID NO: 8629 - DNA, 374 bp, Triticum aestivum
  Clone ID: LIB104-050-Q1-E1-D9
ggataaggtgcattagtgctggtatgatcgtatttgttactacatgcaatgcaattgtatctattcttttttgaagactttatgatccatttgccgtgggtcccagcatctatgtaggaataccctatcttgtttataacagctttgatacatgttaaatattcgaaaacaatgtccgaacatataattgttgtcccctaatataacaaagatcacgaaaaggctcgaaaagtacattaaagtacaatttggagtagaaaaaaaacaatagaagaatttcattttccttcctcattcattggagagctctctttgggctttccgaaaaggtatcacatgtcaagtttggcctcactgtataaaagttataaagt

SEQ ID NO: 8630 - DNA, 402 bp, Triticum aestivum
  Clone ID: LIB104-050-Q1-E1-E1
acggggaacaagaggaggtcaccaaacaaatccggaatgaggtcacggatgttaaaactgatctgtctcaaattggctttgacgttgaagcaattcaacagatggtagctggactggaagagaagattgagttgcttgacaataaacaggatgcggctaatgctggtatatggtatctctgccgaatggcaggaggtataaaagagggaataaatgccaagtttttccaagaagcggatgaaaaactcaagctcttggacctggctcatactgaaaagaagccggtgaagggtctggagttgtttctggagagcaccaaggaagccaaggcactcgactccaagcctaagaccatcgtgcagaacgatgccaagaaaccgatgaaggcgttcgacgtgcctg

SEQ ID NO: 8631 - DNA, 368 bp, Triticum aestivum
  Clone ID: LIB104-050-Q1-E1-E10
acgggcctggcactctctctggaggacaggcgccatggcggcggcggcgctggcgcagggaactcctcgggcgattcgccgctgctcctgctgccgatgctggacgacgacatctcccgtgaggtccagcgtctagatgctgatatggaccgcttcatcagggcccagagtgagcgcatgaggcagtctatattggagaaagttcaggcaaagcagtttgaagcgctggcctctgttgaagacaagatcctccgaaaaatacgcgataaagagtcagaagtgcagaacatcaacaaaaggaacctggaactcgaggaccagattaaacaaatggcaggggaagttggtgcgtggcagcaacgagctaa

SEQ ID NO: 8632 - DNA, 407 bp, Triticum aestivum
  Clone ID: LIB104-050-Q1-E1-E2
gacgggacgccgaagtcctgtcaggatgggcggcgaggtcgtggcttagaggggagaatgttaggaataagccaagcatgagtatgtgctcatgtgtgtgatctgcatgcatggatggattagttagctagctatggagccggcgcagctgagtcgcgtggcagttctgcgtggaggaagaataggaagcaatagttgaggcttggtcctatacgtgtgtatccaaagattctggagacttggctgttacccaagcgtgtgtagctagcccgtggagtactaatcggatcaagcaaccgtgggcttgaccatgcatgcgtgtgtgcgtggggttagtgggtgtgtgtgagtcttgtacttggctatataagttgagtaaatgaatgagaaaagccgccgtgaaggct

SEQ ID NO: 8633 - DNA, 418 bp, Triticum aestivum
  Clone ID: LIB104-050-Q1-E1-E3
gacgggtcagataatctgttgagttttgtgttgtgaagttttcaagttttgggtaaagatttgatggaatttggaataaggagtggaaagagctaagcttggggatgcccaaggcaccccaccaaggtaaaattcaaggacaaccaaaagcctaagcttggggatgccccggaacgcatcccctctttcgttttcgtctatcagtaactttacttgaggctatatttttattcaccacatgatatgtgttttgcttggagcgtcttgtgtgatttgagtctttgctttttagtttaccacaatcatccttgctgtacacaacttttggagagacacgcatgaatcggaatttgttagaataccctatgtgcttcacttaaatctttttacctaaataattttgccctagtgcttcact

SEQ ID NO: 8634 - DNA, 57 bp, Triticum aestivum
  Clone ID: LIB104-050-Q1-E1-E4
acacacatgccaagagggtgatatcaaagttttcaaattttgggtaaaaaattagcg

SEQ ID NO: 8635 - DNA, 254 bp, Triticum aestivum
  Clone ID: LIB104-050-Q1-E1-E7
acggatccgccaacggccagccgaatcgacggagaaggaatggcttcaaccaggggagacgtacgatgggagttcggccccggcgaactgatacggaggatagtgtacggcgaactgtctatgtctcagacattgatcaacatgtcactgaacagaaacttgctgaggttttctcaaactgtggtcaagtggtagattgccgtatctgtggtgatccaaactcagtgatgcgttttgcttttatcgacttcgcc

SEQ ID NO: 8636 - DNA, 365 bp, Triticum aestivum
  Clone ID: LIB104-050-Q1-E1-E8
cggaagtcttaacaatcaaggggtggtggcatccttgtgctgctccatgtaaactcatgtaaattattcggtagacgcagacgcagcagctgtcgatgccgttgtctgggttcttggagctacaaatttttgccttcccacgccgtgcatttgcatgaattggagggaaaatttgaacagagctactgcatagtgaaggttttgcatcgtgtatgtaagatatccgatatgtgaaaatgaatgcatgaaagctctgcaaattgtgttgtcatgatttccaatatggtcacaatatccctgaaaccgtatatctgatttcctgaattctcagtgttgagtataatgtttatttaggaaaatggaaa

SEQ ID NO: 8637 - DNA, 363 bp, Triticum aestivum
  Clone ID: LIB104-050-Q1-E1-E9
atacaatgaaaaatgtaactaaattaaagtagttggaacttcaacccaaagacaaaactctaaatgctctttatcattttttttcatttatatgaaaaaaaattgataaaaaaatgctttttcgaaaaataaaaacttcttcaaaatccttagcaattttaagataaaattagattttcctaattgctcaagagaaatcaaaaaaattatcaaaatattttttttgatgtatctttttatattgtacaaacataagattttttgctcacttaaagtaattaatttcaagatcttttatttcctcattaagaggaaatagaagatctttttttaatactgtctcaaggtagtgatgggaacaat

SEQ ID NO: 8638 - DNA, 360 bp, Triticum aestivum
  Clone ID: LIB104-050-Q1-E1-F1
actttaccgcgattcaataagagtcaaaataagaatttttttaagaaggattacattatctataaatatagaatttagataaatatacacacacatctggatatattctagatcttcttttttgactatatattatatttttctgttttaacaaattcaatataaaaaaaaccgaactttttctattatctattaatgtgtatctatccgtaccgtaatattttggaatattatgaattagataaatttacatgctttctcattccattcgcgaggagctggatgagaagaaactctcatgtccagttttgcagtagagatggaactaagaaagagaaccatcgactataaccccaaaag

SEQ ID NO: 8639 - DNA, 386 bp, Triticum aestivum
  Clone ID: LIB104-050-Q1-E1-F11
atacggacttagcatagattaattaatgcctatccaccatatgaataattaaaaatagttatcgagccaaaatgtatactataatctttggctgtgttcaacgaaagcaattatggacgagcgcggttccctcatttattacttaaattgtagatattgctccatgtaagaatataagatactgactatatattgactaatgtattactccaatttaacggaaataaaggtgacacatgtactcaatcaacaagatgagttattcataatgtaatgaaatgggacatatcaaaacttgagtggtagagttgctgcctcttaattacaaacagtttgaaagcaacccctccttctaactaaatctgatattgctccttattatagaa

SEQ ID NO: 8640 - DNA, 405 bp, Triticum aestivum
  Clone ID: LIB104-050-Q1-E1-F2
acgggcgattgaaatgtacattaggaactgactcctgtctgcaaatgttcagtggtggtaaatatggcaaatgtgaagttatcaaagacaccactgttggcataaaatcctatgcaggtattgctgcggagggtatcggaagcaaagcgctcttgatggcaatgaattaccatgtcaatacatccaatagcgctttgtgggatcacatgccaatggttttccacacctgacctgagccgaaatttttgcaccgtacttccgccatgttaggccgcgtttcatcttttgcttgttctgatagtatttcaaccctttttgtgggaaaagctgatattggttagatgttgggtatagaagagccatagagggaacctgacaaagacattttcggcagcacggcccaat

SEQ ID NO: 8641 - DNA, 366 bp, Triticum aestivum
  Clone ID: LIB104-050-Q1-E1-F3
cgggggcaacaatcaatacatcaacttcaacgcaacgcagcacgggcaacgttggttgaacaaggagctgaccgagtccagcaatggcggcgagggctgcatgtaccggccggctgctcagagcaaccaccgccaaggacagccgtctgccatcgtcgtccccggcggccagccggccggcgtgccgcatcccgtctctcaagttcccgttcctgtgggacaccaaggcgaggcaagggaagatcagccgcgccgccgagcagagggcggcgctgatcaccctgggagcatccagcgccagcaccacggaggagaaacaactcctgccgggggaagcgagcagtgtagatctcctgctgcctctgg

SEQ ID NO: 8642 - DNA, 424 bp, Triticum aestivum
  Clone ID: LIB104-050-Q1-E1-F6
tcccgggccgacggatccgcgggacccgccagtcagcgggccccagaagctggcgggaaggacggcggcctgagagacagacggctgggacccgcgcccagccggattactattgtaccctcggggggtaggcctatataaacccctcggggcacccatgcaaagggttcggacctagagaggaagatagaccagatagcccagggagaagagagctagccttgctctctcccacctcccaaaacagctccaggagcaccattgtagttaccttgctttagtgatcatgcggagaccccgcagagcagcagtaggggtgttatctcctaggagagccctgaagctgggtaagttccgccagcgtgcatgtcttcgcctcatcccgcttccaggcaccggcgacgttctactcgctcccaacatg

SEQ ID NO: 8643 - DNA, 384 bp, Triticum aestivum
  Clone ID: LIB104-050-Q1-E1-F7
cggatccgcggaccccgccactcaccgggccccacaatctggcgggaaggacggcggcctgagagacagacggctgggacccgctcccatccggattactactgtaccctcggggggtaggcctatacaaacccctctgggcatccatgcaaatggttcggacctatataggaagatagaccatatagcccagggagaatatagctatccttgctctctcccacctctcaaaacatctctagtagcaccattgtagttaccttgctttagtgctcatgctgagacccctcagatcagcagtaagggtgttatctcctatgatagccctgaagctgggtaagttccgccagcgtccatgtcttcgcctcatcccgcttccaggca

SEQ ID NO: 8644 - DNA, 431 bp, Triticum aestivum
  Clone ID: LIB104-050-Q1-E1-F8
cccgggccgacgagcactgcacttgccatgcataccacgcatgcaaacgtacacgcatggaacatttgttattctttcgatggaccggtctcctcaccgtatgtgtacattttacgtggggctttcttgcttttttgtggtggttaaaacctgtgtaattatgattatgttggtgtgttaatttgttggtcatggtataatcaggaacttgtgcaaaaaaaaaaaaaaaaaaaaaaaaaaaaaaaaaaaaaaaaaaaaaaaaaaaaaaaaaaaaaaaaaaaaaaaaaaaaaaaaattaaaaaaaaaaaaaaaaaaaaaaaaaaaaagcgggccccccaaaagtttcaaacttaatttacccttaaatgaaatttaaaacccctccaaaagtgcccccaaattcaaattcagggcccttcttttaaaaattt

SEQ ID NO: 8645 - DNA, 369 bp, Triticum aestivum
  Clone ID: LIB104-050-Q1-E1-F9
ctcgtatccagttacataaccgcaaggtgtcgatgcccatgggcgacactcacacctcgctcacactcgggacagcctaggcggatccatgctttccaacgaagcacgcccatccaacctatgcgggtggaatcgatgtccatggggacatcgcggtatttcgtgcgcaagacgactatcccgacacccacacagactaagataatccatgtcagcccatgccatgacacgcccattctcttcggcgacgaggtgaacagattcccgtggggacatctcggtaatctcatgccaacaagttatcttccaccacccctaggcctcgaaaaatccaggtcagcccacacattacactcacattcttcgcag

SEQ ID NO: 8646 - DNA, 407 bp, Triticum aestivum
  Clone ID: LIB104-050-Q1-E1-G1
gacggggagaagaagaatccagcgagaacgtcaaggtcatctacgcccgcgccaagcagtacgccgaggagtacgatgcccaggacaaggagttggttcagcttaagcgtgaggcccggatgaagggtgggttctatgtcagtcctgaggctaagctgctgtttgttgtcagaatcagaggtatcaatgccatgcacccaaagaccaagaagatcttgcagctgttgcgtttgagacagatattcaatggagtgttcctgaaggttaacaaggccaccatcaacatgctccgcagggtcgagccatatgctgcatatgggtacccgaacctgaagagtgtgagggagttgatctacaaaagaagttatggaaagctcaacaagcaaaggattcctctgaccaacaac

SEQ ID NO: 8647 - DNA, 234 bp, Triticum aestivum
  Clone ID: LIB104-050-Q1-E1-G3
gtgtcacgaacatacacgtgatattgagcccttgtagacatggattgtcgtaaccccatattggtacaatcttcgaaagacaggtctcgatcaccctgcatctaacgtgtctgtcatcagggatttattccaatctgttccactgggctaatacagaactcatgtgaacctgcctgtaacgttctaacctttctttagtcttccttcgattttaaattcctctctctgcgtttt

SEQ ID NO: 8648 - DNA, 347 bp, Triticum aestivum
  Clone ID: LIB104-050-Q1-E1-G4
gacgggacttcccatgcaatcatgcttccgaaactggtgtccatatcgctctataccagcgacggttttcactacgccagtttggctagttccatcaactcgctgggcaggactaataccatcaagtccaaaaggcccttcagcctttggccgatctagcgaaactttatgaaaagtactctggctcaccatgaaaggaattgcaaaatgcttcaaagtaccccacgaccgtgtctacgtagatgtttctacggcaggaatctgatcgcattgaccccaaacagctgctaacctgccactaccacggcatctttgaagtaaacatccgccccttatacggacctcat

SEQ ID NO: 8649 - DNA, 229 bp, Triticum aestivum
  Clone ID: LIB104-050-Q1-E1-G8
gaccggtctacggtatatctatcttcatcattgtttagggtatcgtgctttcttgcagtggttgagccgtgtgtcattacgattatatttctctgttcattggatctgtgatgtttatccacacgctcatgtgggttcagatacatggatggtctgagtacaacgctatgtcaggaacacaacaactgttacagttcattcataatgtacttcttgtgtttgctcaaaa

SEQ ID NO: 8650 - DNA, 377 bp, Triticum aestivum
  Clone ID: LIB104-050-Q1-E1-G9
gaatatgaatgcatttttcattcgctgaagagtatcaatgattgataatatacgagggaagtgtaatgattagaaagctgtatatgtttttaggcttatttttaaaaggagagtaacatagaaaactacttagaggcgactgactcacacaaaaaaaaaactaaattcatttttttttcaatcaaccatgttagtttgttagaaacttaagtttaggtcttagtttaacaaacgcacgaaatttcgataacattagatgttttacatattgttgtaccatttacaaaaactcctactattactttgtaaactaaaatccaaaagaatcatttacaattaccacattccgaaaaattaaaacttgcgatagtacaaga

SEQ ID NO: 8651 - DNA, 389 bp, Triticum aestivum
  Clone ID: LIB104-050-Q1-E1-H10
tcccgggccgacgggagctacaacaactccgatgatggtgagatcatggcttaggaagtgagtgttatctataagccatatgagtgtgcatggtgcgtagatgcacatgtgtgtgccacgtatgtgtgtctaggctcaagccagaggccggtgtgtgaccacgtctagctaagcgggagtagccgagagtcagtcaatctgtttgagttggtcatgtagtgctatagtgtggcgcgcggccggacgagccaatcatgcagatcgtgcatgcatgtaggagtcagcgggtagttagctggttagtggccggtgggcgtgcgtgtgtggtggccagggttagtgttgtgcgtgcgtctgtactagaccggatataaatcccctgctgctgt

SEQ ID NO: 8652 - DNA, 176 bp, Triticum aestivum
  Clone ID: LIB104-050-Q1-E1-H12
ttgacagggtaactgtacctgctcccttattggaaagtggtacatcatagaaaactgtttctgtgacacctacaccagttagtgaggaagctaaggatcatgatcatgacacttcagaacaggatactactggaagctcgtagatcaacgagatctaagatccgcaccagagtggt

SEQ ID NO: 8653 - DNA, 360 bp, Triticum aestivum
  Clone ID: LIB104-050-Q1-E1-H4
ccacggactcctgttcatccagcctccactgcgcgctactccaccggctactgttcaaccacccctccacgggcacccctccaccctccactattcatgcagccctccacggggtcgtactattcatccagtcctccacggggtcctgttcatccagccccaaccggctcgatcgatcggggtcctgttcatcccgaggcaacgccaccgctcattgttcatccaccctcccccccccgcaacgctcactgttcatcccagaggcagcattgatcagcttctgttagcagcagtagctaaggaatcgctcgatcgggttcagttaacagccattgatcgatcgcccgggttcagtaacac

SEQ ID NO: 8654 - DNA, 429 bp, Triticum aestivum
  Clone ID: LIB104-050-Q1-E1-H5
ccgggccgaccaagacacggattaaggaatccttgttggaagcacaccaaccgcaacagccgcagccgccgccacgcttcgtggccgtgctgcggacgatgctctctgtgctgcgccagagaggccaccttgccgggggaaccaatggctcgcaacactacacgcggcaacaggctccagccctcgtccaacccaatcccgttcacatccccgactttctctggggctattatctcggctacgagctgggctttgatgattgcgccaaactggacgaggtgatagacgacgccatggctgatatggcttgatgacgactctggtctgatgaggaaatggatgaggctgcatgattctatgcatatatagtatcgaaggccacgctctccgtgtttgtgattttatttgcccactgtttgtgtggagtta

SEQ ID NO: 8655 - DNA, 352 bp, Triticum aestivum
  Clone ID: LIB104-050-Q1-E1-H6
ggtacgtattattattgtgatatcaacattaggagggtcaatggtcacagcgaatcttgatatttgtatgagcaagtttgacttttgcatgtaatcgaggccagtgtggtgttcgaccgacgaaggcttaacgtgacgcgccccaaactaagtgcagatgctaggatgccgtgtgatgctgcaaacacggcgatatgccgatggtgatgcgtgagaagcggcacgacgtatcagaggctggagccgtgatggacagcatcaaattgggtccggtgaaccagacggtcttatcggtatgtctggccagctgttcaaacgtatgttccttcagtcctaaccgatagtatcgttg

SEQ ID NO: 8656 - DNA, 246 bp, Triticum aestivum
  Clone ID: LIB104-050-Q1-E1-H7
acggatactgtaatctggtatctattgttcttgactgagaaaactaactagattcagtctaatcatttataatgatcttatgtagggaatactatgtctatttcatgaaatgacgtcacgggcgtatttcatatgatgtgggctttaagaatccaaatatagttaagcgctcatggtgcctgtgatatcatcctgacgctcccgggatattcttttcctgctgggtctgataaaaggttacttctt

SEQ ID NO: 8657 - DNA, 270 bp, Triticum aestivum
  Clone ID: LIB104-051-Q1-E1-A1
ttgaatgaaattcagtccaatttcttgcatgggacgtaagcatgcacccaagaacaatgatttgacttttcaaccactttatgtgcactggtgcatgtgcatgtagttaaaatttgaattatgcacataagtgcattgacaactcacttaatgcataaaaatgtccaaacgaaccacgacgattctcaaaaaataacacagcactcatgttgttctaagttgataccggaaatttttttaaagcaatatgaggcaatggatatagtttcg

SEQ ID NO: 8658 - DNA, 424 bp, Triticum aestivum
  Clone ID: LIB104-051-Q1-E1-A2
ggtttccaaagaatgaagagaatcgtgctgcgttcgagaatgttacaaaaatttcgcctgcatttgtgctattcttcaattgttccgaggaagagatggaaaggcgtcttttgggacgcaatgagggtagagttgatgacaacatcgagactatcaggaagagattcaaagtttttgttgaatccagtttgcctgtgattgagtactatgacgcgaaggacaaggttaagaagatcgatgctgcaaaaccaattcctgaggtgtttgaagatgtcaaagccatttttgccccatatgccaaggctacatagaacagtataaaggaccacaaaggtgataaatggaatgatttcatacaaggttttgctcaagtgtgactacatatctgtgattacaaacccttaatatagatcagacttatcag

SEQ ID NO: 8659 - DNA, 451 bp, Triticum aestivum
  Clone ID: LIB104-051-Q1-E1-A4
accggtcaaacagtcacgggccgacggggttataaaagaatatgataaggttttgcattagcttatactaacctatctcacgagttcttgttgagtttgttgtgaatgaagcttttgataaaaagagaaaccgtgatatgagaggaattaaggacacataaaagctcaagcttggggatgcccaaggcaccccaagataatatttcaagaagtctcaagcatctaagcttggggatgccccggtaggcatcccgcctttcttcttcaacaatcatcggttagtatcggttgagtctaagtttttgcttattcacatgagttgtgctatccttgcaatgtagttttctttagctttgcttgctgtttgaataaagtatcaagatctgaaattctttaatgagagagccatacatgatttggaatttgctataatactctatgtacttcactt

SEQ ID NO: 8660 - DNA, 427 bp, Triticum aestivum
  Clone ID: LIB104-051-Q1-E1-A5
acgggggaagtagtgatattaaagtcatgctagttgggtgattatgaatttaaagaatacttgtgttgaagttagcaagtcccgtagcatgcacgtatggttaaagttgtgtaacaaatttgaaacatgaagtgtacctggcttgtgcatccttatgagtggcggtcggggacgagcgatggtcttttcctaccaatctatccctctaggagcatgcgcgtagtgcttggtttttgatgacttctaaatttttgcaataagtatatgagttctttcgactaatgttgagtccatggattatacgcacttttacctttccaccattgctagcctcttcggtaccgtgcattgccctttctcaccttgagagttggtgcaaacttcgccggtgcatccaaaccccgtgatacgatacgctctatcacac

SEQ ID NO: 8661 - DNA, 449 bp, Triticum aestivum
  Clone ID: LIB104-051-Q1-E1-A6
ggtaccggataagcaattcgcgggccgacgggttatatcattttgagcttgatagtttttgctctagtgcttcacttatatcttttagagcacggtggtgtcttaattttgaagaaattgctagtatctcatgcttcagttatatatttttgagagtcttttataacagcatggtatttgctatggttacaaagttggtcctagaatgatgaacatccaagttgggtataataaaaactatcatagaaaaagaattggatgctatgatcaatatgatgcttgataattgttttgagatatggaggtagtgatattagagtcatgctagttgaggtgattatgaaaaatacttgtgttaagggttgtgattcccgtagcatgcacgtatggtgaaccgctttgtgatgaagttggagcacaattttatttattgagtgtcttccttatga

SEQ ID NO: 8662 - DNA, 398 bp, Triticum aestivum
  Clone ID: LIB104-051-Q1-E1-A7
gacgggtgaagcatgccggcacgccgtcgatgagctccgacggctccgtgaccacgagcgccggcgccggcgagaaggagccggagctgctgaatctttttgtttaatgaagctagttattaatctgcgcgttcattcaccgtagtagtaccgcgcgatcgaccgatcgatcgatgcgctgctcgctcgctggcgctggaaccagctgaactttttggtagcctccctctcgtcccaccggcgacgcgccccttgattcttttttgggcgtgcatgaaccgccggctcggtgtgacacggagatgactagatgagaccgccccggccggctttgttccttgtctactccgataatagtaccgctgctttctaagcaccaccactactgctacaaagat

SEQ ID NO: 8663 - DNA, 451 bp, Triticum aestivum
  Clone ID: LIB104-051-Q1-E1-A8
ggtaccgtactacaattcgcgggtcgacaccacctatggataggctatttcctcgcgggtcccaaatgtcagaatccaaatctgtcacggccatgcagcctttcctatgaaaatttatagcccatttgatgtgctggctcgaaataagtttgtgggtgctggtgggggctagtcacttggcttctgtaatgcacagtgagatcaagcagccggcgagggtgatgttatttcccttggttgggatttgttacaatatttcactcaaaattaaacaaatggcaagccatttgccttgtttcaaagaaaatatgacagtcacagccgagttgaaaagggcaggaacatctaactccaacttacaaactgtacaaaagtacgagggttaattgttcatcaggtttacaaaaaaaccagattgaaaagggcaacaacatctaactccagcactgtt

SEQ ID NO: 8664 - DNA, 403 bp, Triticum aestivum
  Clone ID: LIB104-051-Q1-E1-A9
gacgggaattggatacgggatcgttcttgggccaccggaagcgtcgcaggcatggcagatgaggaggtatcagacccaaagggactcctacaggatcgtaccaaggctaagtgtgtctaccagtggtatgaatatcagaaatgcgttaagagaattgaacgtgatgagaccgggcagaagcactgtactggccattacttcgattactggaaatgcatctacaagcatgttgctgagaagctctttgatagcttacaatgacaaggaaattgttctctctagctacttttcactcaacactggtaataaatagtatcatttgcacgccttatctgacaattcaggtctttatcatcatatatgtaaaagaaggttttgcctgtcgggtaacacgacagttttt

SEQ ID NO: 8665 - DNA, 295 bp, Triticum aestivum
  Clone ID: LIB104-051-Q1-E1-B1
gtgcatcaatgagagcttcggtgggttccgcgacgggaccgggacattgttcgtcaacatggctgacagtgttgtttcgcttgacatcaggacgttggccatggagaggctatgtgttccgcccactacgaacggagacccctcggcgacctctacccctacgagatggtggcgtggccgccggagctcaaggacctggtgaatcctccggtgaatgcatatcgtggcactgcgtgctgattactgtatcgtgtgttttggtggtgtcagtgacaatggaactgctaagttcagt

SEQ ID NO: 8666 - DNA, 421 bp, Triticum aestivum
  Clone ID: LIB104-051-Q1-E1-B2
gacacggcaccagtagtcggccgcagtacaacgggggatctaccggcagacacgggtccaaagctactcatgcgcttagtagccaacaagcggtcaaaccaaccaagcctccgcccgtgcagagcacgggaggatcacttgcacgaaggcgtcctgcaaggccaaatcacgcgtgtcacaccagcagcaataaagctacggatgcaacgattttccaaaggcaactttatcgggacatcggtgcaacgttgtcggacggtcttatcatgcacgaaacgggctactttcctgtttcccgagccgcattcggctgttgggtcagaatttcacttgagacgtacaggagaccgggacagcgatgacgttgccaccgaggggcaacgtttttccggaggcgacattggagggacatcgttgcgac

SEQ ID NO: 8667 - DNA, 413 bp, Triticum aestivum
  Clone ID: LIB104-051-Q1-E1-B3
gaaattcacgatttgatgacttggtgaccatagtacaaaagtactatgcgatggagagcgcctggaaaaccgaaagtaaattttgggataatccggccccgaatacatccctagtccaaaataaaagggtgcatcattaccaagcacctgtgttaaacaccaaaaaaccaaaaacccctaaagggtacggaaccgtactggagggttggctaaacggaccctgcaaaattcatagcacagagggcgccactccaactcacagccttcgagcatgttggatactacggcaggtggccaaaagtggcgaaaagcttctagcttcagaatcccaacccagcaacaccagtacagtgttaacagtcttcgaaactttggcatcaaattacatgcgaaaacaaacactccgcaacctt

SEQ ID NO: 8668 - DNA, 413 bp, Triticum aestivum
  Clone ID: LIB104-051-Q1-E1-B4
gggatatctgaacacaatctctttattgcattcagtgaagaaatctgttgcagaaaataaaatacgtacgtgtgcttgcactgtcttcctaataatctggtgtaagtttgcttaatctgtccttttttaatcgacaatggatgttggcaggagcaactgacccaccacgatgctcagttcagtagaaaaaaaggatgctcagttcagtacagatctgttgtgattttgcaaggcctactgggggcaaggcacaaatgtatcaagggggtgtatgtaaaaagataactgagttgatcccctcccttgcatgcagatccaacacaccatggggtcttggagcagcgtatcatgagatggaccgtagcactagatattttcccctagctgtacaccaagcaaaatcgaccttggac

SEQ ID NO: 8669 - DNA, 453 bp, Triticum aestivum
  Clone ID: LIB104-051-Q1-E1-B5
taccgaactagaattcgcgggccgactttgacgatacgactacgaacgtgcgaggacgtcgcgccttagcaatcgctaaaccaactccgagaggttattgaccacgccggagcacgatcaacctgaccacgagggtctgtttcctgcgagcaaacgaagaacaagcaagaaactgagattgcaatctggatattgcgaatataagatgaaagctttattgatcaaggtggggttctgtgacgcctttgtctggtcgttgaacacaaacgaagtacgcgaagttgcagctatggtgaacttttaatctaaacaaaacccaaagtctaaatgatgccctaagggctgtatatatggaggaagaggggggaatttcgtggcccttggtggaggggtccgaaatcaaccctatctcttgtttccccacacatacggactctaaaaatagcctatact

SEQ ID NO: 8670 - DNA, 441 bp, Triticum aestivum
  Clone ID: LIB104-051-Q1-E1-B6
attcggcggtcgacgggagcaaaaacgacatattgcagaggaggtgtgatgagcagtttgccatccaccgtgcacaagatccagagctgctcggcggcatgatcgacgacccacccgaagaaccgccgtcaccagtgctcatcgagagcctgataccccgcaaggaatgggcagaggacctctgcggttcagtcaagacaaaggcagcatgtggcttcatcattgcctgcggcggccgtgtcaacgtcgatcccgatgatgtggtggccaggctcgagcgcatccttggcggagttgacgtccccgatgaagtagaacatcgccaacatgatatcttgaggatgcaggtgatcgacggaatttgctaccaagcgagagacatggaaatggagcggtcccgcggagttgtcatgcgcgtgattgcacgctatcaagctcttc

SEQ ID NO: 8671 - DNA, 429 bp, Triticum aestivum
  Clone ID: LIB104-051-Q1-E1-B7
attcgccggtcgacgggctcaagaagtccgtcttcgggcatgacgacgcgctccggatataaggccagagcggaagttggggtcacgaatccttgggagatcaagtctccccagacatcagtgacgtagtctaggttttccaaaactaatctggtgacctgggaggtagctgtcgatctgctccagatggccaagcgagttggcccacagtgcgaagccgccgaacatgaagatctggccggggagaaaaacttccccccggacagcattgttgtagatgattgacggggccatcaaacctcttggtgacgacgcagcggaactctcagtgaaagcaccagtctcggtgtcaaaaccggcggatctcgggtacggggtcacgaactgtgcgtctaacgtcgatggtaacaggagacatgggacacgatg

SEQ ID NO: 8672 - DNA, 340 bp, Triticum aestivum
  Clone ID: LIB104-051-Q1-E1-B9
aattcccgggctgacgggagggagagaggcgccagggcttggggtgctgctcccatgcgcctccccacgatagataggggtggagggggctggtttcttgccctccaagtccactggggcgttggcaaaggtgggggaaagaaatcccatcatttcccttccccaccgagttgttatcccccttttttagggatcttgatcttatcccttcgggatatgatcttattccttcgaaggtgggatcttggtgcaccttgaccagaggtgtggggactttcccccactacccacgttcaagttggtcctcccatgcaagttggcctcacttcgtaaccttcta

SEQ ID NO: 8673 - DNA, 409 bp, Triticum aestivum
  Clone ID: LIB104-051-Q1-E1-C1
gggttgcaacaatggtcgttcacgatcacattcaacggcagcttcctcggtacagggggtcagtccctggccgtgctcccaacctgaaccgcaatatggagagaggccacgccctgctctatgctgattgcttttccaacaaactgttcttcaagccggataaattccgacgccgttttcgaatgggaaggcatgtgttcaatcgtatccgaaagggagtggttgctcatgacccatacttcgagtgcaagatggattcccttggcgagcttgggttctcctcttgccagaaatgcatcgcggccgtccgcatgcttgcctatggaattcctggcgatctggtggatgagtacgtgcgtattagcgaaacaacatgtctgatgtcaatgtacaagttttgtcaggttgt

SEQ ID NO: 8674 - DNA, 429 bp, Triticum aestivum
  Clone ID: LIB104-051-Q1-E1-C2
gggtgttgtaataggtaggacaccttatttcagaaaatcaataataaacaaatgcaacatggatagttcacatatctgcatggatagttcagaaacactagtcattttcattcatctctgcatcagcatgatagcactcaagttcacattgacagcacaacatgggcgatgctccagtatttcaaaataaaagagaggaaaaaagggacatgccccagcatgatacatgctccagcttgggctccacaaaagataaagtacatggttaacagcatcttgctgtttctagttacacaaaaatgatgtagcgcatacatttgtctacaaaaaagcagtctaaaactatctaggaaacactttgctccaattgacatcttctaagaactactcagcagtttctgaaactcttcggctgagttgagtgtgttt

SEQ ID NO: 8675 - DNA, 387 bp, Triticum aestivum
  Clone ID: LIB104-051-Q1-E1-C4
gggaaaacgaaataagaactgttctcgcaaatccacttcagtttggcgacatggcgcagaaggctgggagacgaatgagtgattcctcggacatccatgaattacatattagcacctgcataatcgagaaagcagattacaaataatggtagaatctgaacgaattaagaagatgtggggaggggggtggcagagaaggacgacggtggtcgtcgcacgacccgtgatggatgagctccaccggcgacgcccatgacctccgaagaaggggtggaagagggtcgagcggagctgctcgccggggaagggaaggcagctggccatggaagggagaggattgggcggtgggatctagatcaagatttatttctttttctaagaacatct

SEQ ID NO: 8676 - DNA, 411 bp, Triticum aestivum
  Clone ID: LIB104-051-Q1-E1-C6
attcgccggccgacggggagaacaagaagaaggacggggagcacaagaaggacggcgagcacaagaaggacggggagcacaaggagggcatgatggagaagatcaaggacaagatcagcggcgacggccacggcgacggcaagaaggacggcgagcacaaggagaagaaggacaagaagaagaagaaggacaagaagcacggcgagggccacaaggacgacgacggccacggcagcagcagcagcgacagcgacagcgactgagccagctccggccgcgtgcagtgcaggggagatgaacgcgtgggttaatttggagcgtgtggtagcatatgtatgtaatgcttgacatgtctcatggatcttgtaatgtaataaccggctgcactgcatggtgcttgtaataataacg

SEQ ID NO: 8677 - DNA, 435 bp, Triticum aestivum
  Clone ID: LIB104-051-Q1-E1-C7
attcgcgggccgacgaagtcatcaaaaacgcattcgtaatcgacgggaacgtcttcttccactgaacgcacaatattgaaagggctgaaataaattcagaaaaatatgagcaccaacgtcaaataaagtctgacacttaaactctattcggctgaggataccactgtcctcataaccatccaaccacaggttaatttgttttttctttcttttaaggatacataatttgtctgatgagattgattttacaacacttgctgcgttaattaacaagctcgagaaaaacacatcagatgaacgagtaataagtgggcaggcaacataaaacaagaaatgcaaattgaccatagctcagatggttatgtttcttgtggtggaaccaactcattagaatttaagtccttgacttagtatcggcggtcgcatttttctgaa

SEQ ID NO: 8678 - DNA, 369 bp, Triticum aestivum
  Clone ID: LIB104-051-Q1-E1-C8
taccggactaaaaattccgggtcgacggggcggactggtccgagtgaagagaaaaaaaagccatacggaactcaaaatattttccggagatattcattttcctgaagaggcggataagatattaggtggctgtttgataccgccagaaagacaaaaaaaagattctaaggaatcaaaaaaaaggaaaaattgggtctatgttcaacggaaaaaaaattctcaagagcaaggaaaagtattttgtttccgttcgccctacagtggcatatgaaatggacgaaggaagaaatttagcaacacttttcccgcaagatctcttgcaagaagaaaataatctccaaattcgacttgtcaattttatttctcatg

SEQ ID NO: 8679 - DNA, 369 bp, Triticum aestivum
  Clone ID: LIB104-051-Q1-E1-D1
cggtaatacaagtaaattaaattacctcatcttggagcttagtttgtttctttaaagcaatgatcagctgcatatgttatatttacatgctttggtgttgctgaaatgcttatattcatttttgttaaacctcctatttattttattactaaaaaggctatgaagcttgagcatcatagtttgcttctcagggttgaatcatgttgttgctatgcagtaggtatggttgccaagaagcactacgggaaactgcgaagaacactattaaaattctttggttggttgttgatgtcttgagagcaagtacaatagagttgagttagttggctataagaaatacactagtatatttttgcttagttggaggaa

SEQ ID NO: 8680 - DNA, 403 bp, Triticum aestivum
  Clone ID: LIB104-051-Q1-E1-D3
gggttcaaacgacaggtacgaggaggaggacgagtacaggaagaagcctactagtggtggtgggaggtacgaacaggatgatgagtacaagaagaagcccagtggtggtgggaggtatgaagaggatgacgagtacaggaagaagcctactagcggtggtggcggctacggaggtggaaggtatgagggagaagatgagtacaagaagaagcctaccagtggtggctatggtggggggaggtatgagcaagaagatgactacaagaggccccctagtggtggctatggtgggggaaggtacgaacaagacgatgagtacaataagaagcctagtgcatgtggatatggaggtggaggagggagatacgaagatgagtacaagaagccaaccggtggccatgct

SEQ ID NO: 8681 - DNA, 424 bp, Triticum aestivum
  Clone ID: LIB104-051-Q1-E1-D8
aattcgcgggccgacgggtcccactagtatacgaaagtgacaaaacaagagactctctatcataaagatcatggtgctactttgaagcacaagtgtggaaaaaaggatagtagcattgtccctttttttattttttatttggcctttcttttttcttctttttttggcctttatctttattttatttgggacaacgctctattactgatgatcatcacacttctatttatttacaactcaaagattacaactcgatactataacaaagtatgactctatatgagtgcctccggcggtgtaccgggatgggcaatgaatcaagagtgacatgtatgataaattatgcatggtggctttgccacaaatacgatgtcaactacatgatcatgcaaggcaatatgacaatgatgaagcgtgtcataat

SEQ ID NO: 8682 - DNA, 390 bp, Triticum aestivum
  Clone ID: LIB104-051-Q1-E1-E1
cggtctactatccggccgacgggggcagaaacaaggggacgagcatcggcggctatacgaggagcatctgctgcgccgagagctgggatcaccttgacccgttcatggcgccgcgatgggcgaaacatttcaacgtgtacaggtcctgagagtgagtgattcacaaggtggaagatcgtgatgatcggctgaacacaaagtctggttaccagtttgaccacaatgtgattcttgttggttctttctttgcactcttacaagcatttcaaggaagtgtttgttaatctttacatggcttttgttgtgggttcagagtccatccatgttgtccaatatgtgtgcaaaagcttttctttctgcccttgtccggtgtgttttgcatttgtgtgt

SEQ ID NO: 8683 - DNA, 423 bp, Triticum aestivum
  Clone ID: LIB104-051-Q1-E1-E3
ccatcgacgacttcgtctccggcgccaccgtctatggctacagaggaaagagcattaagtctgccctcatcggtggttctagcctggcattcacatctgccattctggacgttggcggtaacactaccagagtggacaatggcaaagcgtaccatgcatacacaacggaaaagaagcccgagcctgcgcattgatcaaggttgtctacttgtagcacaaatcatgcaaaccagctcggtgaatttttgagctgatgtgtgctgttatgtctgttttgctgatgcacctagttcctttgcaaagctgtagtaacttgttttgctcgagggcaatacaacagacctggaataaatatcttgctttattttgcttcatcattggttacgataataatcacatgtgacacaatattgttaccccaac

SEQ ID NO: 8684 - DNA, 360 bp, Triticum aestivum
  Clone ID: LIB104-051-Q1-E1-E4
ttcggcgtcgacggggaccaaaaccaacgaccaaacgaaccctaaactccgagcgcacgaggagagagagagggagatctccaaggtcgcggccatggcgatgcgtgcgctgtacaacgagatccgcgcgatgaagggtgcgcgaggtgcccgcgtacctcaagccgcgcctcacctgggcgaacgtgaagaagagcaccgaccaggcggtggaccgctacatcgagaagtacatcgagaccagctcggctgacccgctcttccacatctgcttcggcggcatggccttctcgtacctcgtgggcctgccccaagagcgccgccacctcgagcacctcgagaaacacggcggccactaga

SEQ ID NO: 8685 - DNA, 426 bp, Triticum aestivum
  Clone ID: LIB104-051-Q1-E1-E5
attcgcgggtcgacgggatcttgatgaaactgaatatgatcttcctttacctagaaggcgctctaaaaattcagagtatttagatcttaatgatgaaattgatgaaagtgggattgaaagaaataaaaatctagatgctaaacccactatattggatttcaaggaatttaattatgaaagttgctctttaattgagtgtatttccttgttgcaatccgtgctaaattctccacatgcttatagtcaaaataaagccttcaccgaacatattgttgatgccttgatgcaatcttatgaagaaaaacttgagttgaaagtttctatccctagaaaactctatgatgaacgggaaccaactattaaaattgaaattaaagatcatgagttttatgctttgtgtgatttgggtgctagtgtctctactat

SEQ ID NO: 8686 - DNA, 422 bp, Triticum aestivum
  Clone ID: LIB104-051-Q1-E1-E6
gacgggggcagtaaataagtcgagcggggtcatatttcagggcccaacgtgtgctagtagctcttcatggatcacaaacacagaactcagttcctgaggacggtttcaaggagacaacccaccatgtactcctacatggcctctcacatctacctttaccaaattgagttcacacgcttagccctcaatagtagaacatgttcacacgcctccaattcatccccgatgaatcagacctaactcaactctaagcagtagcaggcatgacaaacaagcatgaatgagtaggcacatcagggctcaaacaactcctgctcatgctagtgggtttcatctatttactgtggcaatgacagatcatgcagaggaaaaggggttcaactactgcaacatgtaacagttgaatccttgttgtcctaatg

SEQ ID NO: 8687 - DNA, 442 bp, Triticum aestivum
  Clone ID: LIB104-051-Q1-E1-E7
aattcgccggtcgacgggctaacatagaaagtggataaaacactaggatcaatttgatgcttgataattgttttgagatatagaggtggtaatgttagagtcatgctagtgggtaattatgaaattgagaaatacttgtgttgaagttggcaagtcccgtagcatgcacgtatggtaaaagttatgtgacaaatttgttgcatgagctgctcttttaattgtcttccttatgagtggaggtagggattgcgcgatggttaactcctaccaacccttcccctaggagcatgcatactagtactttgcttcgagggcaagtagacttttgcaataagtatatgagttctttatgaccaatgtgagtccatggatatacgcacactcacccttccactttgctatcctctattgtaccgcgcaactttcgccggtatcatgcacc

SEQ ID NO: 8688 - DNA, 431 bp, Triticum aestivum
  Clone ID: LIB104-051-Q1-E1-E8
gacggggaccaaaaccaacgaccaaacgaaccctagactccgagcgcacgaggagagagagagggagatctccaaggtcgcggccatggcgatgcgtgcgctgtacaacgagatccgcgcgatgaaggtgcgcgaggtgccggcgtacctcaagccgcgcctcacctgggcgaacgtgaagaagagcaccgaccaggcggtggaccgctacatcgagaagtacatcgagaccagctcggctgacccgctcttccacatctgcttcggcggcatggccttctcgtacctcgtgggcctgccccaggagcgccgccacctcgagcacctcgagaagcacggcggccactagatccggatccgcctcgcgcaagagagcttatccacggttgattcaggatggtgttccccatttttcttccactgatgggcta

SEQ ID NO: 8689 - DNA, 375 bp, Triticum aestivum
  Clone ID: LIB104-051-Q1-E1-E9
acgggcagcaagataaaggtgtgtgcggttgagggcatacacttcagaaggattgactatttgtgattaggcaacagaacaaaaacagtcagccagatcaaagtgtctgcgattgatggcatacacttcacatggatgaactgtttgcgattagccacaacaaacagaaacagttagacacatcaacgtgtgtgcgctagacgggcacacattctaattaaaagaagtgtgcgcgatggtaataacgagcgcgcacggttgttggaacaagacgtgtgctgacattgcctattacagtgcaccatatggtgcaaacgccacgtaggcggccgagaaagcgtgcccatgttacgccttccgggaatagtgctgcac

SEQ ID NO: 8690 - DNA, 409 bp, Triticum aestivum
  Clone ID: LIB104-051-Q1-E1-F1
acgggtcggctcagaatcatgtctttggtcaatagttgggttgcccggctcctatgtttgctaccttacgttccgtttgttcggctagggtagtaaagggagaactactgcggttgtgtttatggttcatctagtcaagcacctcagtagagaaagccgaaaactgactgtcatgatgcggcgagagctggtcagccattcggtgacttactaaatctttaacgatttttccgttttaaacgaaggactatttttccagtcatatacataacgcatccgcattcgaatagccgcatacataccaggggctattttatagccccatcatcaaactcctatggataagtgagagccgtaaagccgtatagtccgattgcctggttcgacgcactaacacctccgtcacgga

SEQ ID NO: 8691 - DNA, 428 bp, Triticum aestivum
  Clone ID: LIB104-051-Q1-E1-F10
ttcccgggccgacgggacttgtgattaaagtttgtgattcccgtagcatgcacgtatggtgaaccgttatgtaacgaagacggagcatgatttgtttattgattgtcttccttatgagtggcggtcggggacgagcgatggtcttttcctaccaatctatccccctaggagcatgcgcgtaatactttgttttgataacttctatatttttgcagtaagtatatgagttttttatgactaatgttgagtccatggattatacgcactctcacccttccacctttgctagcctctctaataccgcgcacttttcgccagtatcatacacctaccatataccttcctcaaaacagccaccatacctacctattatggcatttccatagccattctgagatatattgccatgcaacttttcaccatccaat

SEQ ID NO: 8692 - DNA, 393 bp, Triticum aestivum
  Clone ID: LIB104-051-Q1-E1-F11
attcccggtccgacgggacttgtaatagagtttgtgattcccgtaacatgcacgtatggtgaaccgttatgtaacgaagacggagcatgatttgtttattgattgtcttccttatgagtggcggtcggggacgagcgatggtcttttcctaccaatctatccccctaggagtatgcgcgtactactttgttttgataacttcgatatttttgcagtaagtataggagttttttatgactaactgttcactccatggattatacgcactctcacccttcgacctttgcgagcctctctaataccgcgcacttttcgccattatcatacacctaccatataccttcttcatcagagccaccatacctacctagtatggcatttccatagccattc

SEQ ID NO: 8693 - DNA, 419 bp, Triticum aestivum
  Clone ID: LIB104-051-Q1-E1-F2
gggcttctttagaaaatttgacacaaagaaaaaatgtcacggagattgttgctcagacaacttctcgggcgaggaatgcaacgcaaagagccaaatcggtggggtgtttggcgctctccgtgtcactgatgacctgttgatgaggagggcgtattttaggaagcagcagcttgacaacaaaacaacatcacctaactctaactgaagaggacagccggtgtgatttgctcttacattgataccgcatgcgtatgaataatggtccaatggaattgggagcggagtaagaagctcatgttgcctttatgcatgtaataatcatgcctgcctgcatggcccgctagctgttggtccaatgcctggctgcctgcctgaactggcgtcaatttccagtttgtttttgtaatatataataactc

SEQ ID NO: 8694 - DNA, 421 bp, Triticum aestivum
  Clone ID: LIB104-051-Q1-E1-F4
ggggaattaaaatactttaccgcgattcaataagagtcaaaataagaatttttttaagaaggattacattatctataaatatagaatttagataaatatacacacacatctggatatattctagatcttcttttttgactatatattatatttttctgttttaacaaattcaatataaaaaaaaccgaactttttctattatctattaatgtgtatctatccgtaccgtaatattttggaatattatgaattagataaatttacatgctttctcattccattcgcgaggagctggatgagaagaaactctcatgtccagttttgcagtagagatggaactaagaaagagaaccatcgactataaccccaaaagaaccagatttcgcaaacaacatagaggaagaatgaaaggaaaatcctg

SEQ ID NO: 8695 - DNA, 358 bp, Triticum aestivum
  Clone ID: LIB104-051-Q1-E1-F6
tcttgttgagtttggtgtggctgaagcttttgttaacaagagaagccgtgacatgagaggaattaacgagacacaaaggttcaagcttggggatgcccaaggcaccccataatcatatttcacaaagtttcagtcatctaagcttggggatgccccgttaggcatcccaccttacttcttcaacaacgatcggttactatcggttgagcctaagtttttgcttcatcacatgagttgtgctatccttgcattgttactctattttgccttgcatcatctttgcataagataccatcatgtcaaattctttaatgaaatagactctttgcataggttcaaaactatttaacctcccttt

SEQ ID NO: 8696 - DNA, 415 bp, Triticum aestivum
  Clone ID: LIB104-051-Q1-E1-F8
ccgacgggcggtacagacgtgcccggagaagaagttgatccagcaggtggtgttcgccagctacgggaacccgctggggatctgcggcaactacacggtgggcaaatgccacacgcccaaggccaaggagattgtggagaaggcgtgcgtggggaagaggagctgcgtgctggccgtgtcgcacgaggtgtacggcggggacctcaactgcccgggcaccacggccacgctggccgtgcaggcaaagtgctccaagaggcagaggaccgccgagcaataagtaagctaagctcagatatgtactgctatgtagatcatctcatcaccttcacctttgccgaccatggactttttcaggctgcttgtttgggatgcgtgcatacgtgttgtactttgttgagtcctgtgacttgtt

SEQ ID NO: 8697 - DNA, 398 bp, Triticum aestivum
  Clone ID: LIB104-051-Q1-E1-G1
tccgggccgacggggcagttcacgaaagcactaaagtttctgttttctacagcaagttcaacaagactttccccaagtcttcccaatggttctacttggcacaaacactaattaaacacaaaaaacacaaccaaaaaagaggctaaataatttatatattaggaaacaggagcaaaaatcaaggaataaaaataaattttggttgcctccaaacaagcgctatcgtttaaagccgctagctaggcataaaagcgaggatagatctaggtattgccatctttggtaagcaatccataagtggctctcatgatagtttaatatggcaattttatttcatttccaggaaagtgttccacaccctttttaatggaaatttagatcgaacactcgcttccttc

SEQ ID NO: 8698 - DNA, 353 bp, Triticum aestivum
  Clone ID: LIB104-051-Q1-E1-G10
acgggtaacagaacaattggctttgaagaagcaataaccgttcgtactaatgaatacagcacgaattacaagacatggaaagataagacaacgaaaacattgttacaaagcagacatatagtttcaaatcaattaactattgaagctaatgtgcccaaaagaatctaggagtataactacctacttcaaaggcatatttatacagttcttctacattttatactatcccgtgcgaatgcatgggttgacgactagtgagagtaactcttcagctcatacattggtcacttccccttcatgcttatcgaaggatgaatggtatgatgattgttatgatcatgttgattcttttg

SEQ ID NO: 8699 - DNA, 446 bp, Triticum aestivum
  Clone ID: LIB104-051-Q1-E1-G6
attcgccggccgacgggcccaacaacgcggggagaagcggcgaccccacccccacaagagcccaggaacccgtagaatctcgagtggaccacatcagcgatctctcggactccgtccttggggagatcatctcgcttctccccaccaaggattgctgccgcacccaagtcctctcaattcggtggcgccctctatggcgcgctgtgcccgttaatctcgactgtcgtcatctagctctcttcaatgattttgaaatccccagagccatcatctcctcccaccagggctccgttcaaagcctctacatcccgccttctacctgagcaagcatagcatgccctgcatggtggacgcctggctggaatcccctgaattcacagaactacagctgcttgagttctactattcccctggaaatcacataccacataccgaatgccatgaac

SEQ ID NO: 8700 - DNA, 433 bp, Triticum aestivum
  Clone ID: LIB104-051-Q1-E1-G8
gacggggctagtaaacaaaccccttttcgaatccaaagacaaacagctctggaatatctctaagtctaaggagaagcacgctaagcaactagaacatcctaatgccggtgaaaaatccccttcccgaaaacaagtaaacggctctggaataactctaagtctaatgagaagcacgctaaccaactagaacatcctaatgccggtgaacaacccccttttcgaaaacacattatcacaactctggaatatcactaagtctaaggagaagcatgctaattagctagaatatcgtaatgccggtgaacaatcccattttcaaaatcaaagaacatcagctcttgaatatctctaagtctaaggagaagcacgctaaccaactagaacatcctaaacccggtgaacaatccccttttctaaaacactttcacaccag

SEQ ID NO: 8701 - DNA, 353 bp, Triticum aestivum
  Clone ID: LIB104-051-Q1-E1-H12
ttcccgggccgacggggacgctggtgcccctgtcggagcagcagctggtggactgcgacaagtacgacggtggctgcaaccgaggctactaccacagggccttccagtggatcatggagaacggcggcctcaccacggcggcgctctacccatacaaggcggtgagaggcgtctgcttccgcgccaagcccgccgtcaccatcaccgggcacgcggcggtcgccaagaacgaattggccctccaaagcgccgtcgcgaggcagcccatcggcgtggccatcgaggtccccagcagcatgcagttctacaagagcggcgtcttctcggccccctgtgggtatcagatgacccac

SEQ ID NO: 8702 - DNA, 419 bp, Triticum aestivum
  Clone ID: LIB104-051-Q1-E1-H2
ctgtttttcaattagataatgtgaagtaactttcagtataggaaatctcattttccatatgccgataattctctcaacatgattccgaagttgagcatgtcgaagattaattagttccctgtgattttgtggcctttgacgaactcttccttgttcgtttaaatgatacctagtaccacggtatggagcaagaaactgtggtgtgtttgcataatcagcatccacgagataaaatttaccatcgggaacttcaaaaccatggttaagtgcatcatttagaactcttgcatatgaagctgatccctcccaaccaggatgtatatgcacaaacttcaagtcaaaatctcaggcaaccataacattctgcgagattgtttgcctcctatttctgtatggttcttgctcatccaatggaagct

SEQ ID NO: 8703 - DNA, 446 bp, Triticum aestivum
  unsure at all n locations
  Clone ID: LIB104-051-Q1-E1-H3
accggtcaaactatccgggccgacgggaggtttgataataacttgatatgaagtttcatgatcatcatcattagcttccccactaattggtgtangaatcactggaactgatttctgtgatgaactactttccaataagggagaaggtgcagttacctcatcaagttctactttcctcccactcacttctttcgagagaaactccttctctagaaaggatccattcttagcaacaaatattttgccttcggatctgtgatagaaggtgtacccaacaatttcctttgggtatcctatgaagacgcacttctccgatttgggttcgagcatatcaggttgaagctttttcacataagcatggaagccccaaactttaagaaacgagaactttggtttcttgccaaaccacagttcatatagggtttaatgcgttttctgagactaac

SEQ ID NO: 8704 - DNA, 420 bp, Triticum aestivum
  Clone ID: LIB104-051-Q1-E1-H8
aattcgcgggccgacgggaagatcacgctgactgagctgacggacgcgctgcggacgctggggtcgacctccgcggacgaggtgcagcgcatgatggcggagatcgacaccgacggtgacggcttcatcgacttcagcgagttcatctccttctgcaacgccaaccccgggctcatgaaggacgtcgccaaggtcttctgaatcagttcatttcacctcagccgtccgatccaggagccgatccatctacgtacggcttcgtatatcaatttcatgcaactacctactccggtcccgatccagcctcagcttcacctgaggccggccctaattttgtttgatcattttttttgctaccagtagtaactagtgatgatcactgttccatcatttatttattttatatcatcacaagtttct

SEQ ID NO: 8705 - DNA, 106 bp, Triticum aestivum
  Clone ID: LIB104-051-Q1-E1-H9
cactatggctccagtctcatcgcttctttctttcttcataacacgtttgctccttttccatggctactgcggctcactgagggtacaccactggtctgcagttttc

SEQ ID NO: 8706 - DNA, 400 bp, Triticum aestivum
  Clone ID: LIB104-052-Q1-E1-A10
cggtctagagattcccgggccgacggggagctaattccggtacatgggctccctcacggcgccaccgtgcgccgagaacgtctactggaacgtcctgggcaaggtgaggcagatgaccaaggagcagatcgacctcgtcaccgcgccgctgccggccgccgccaagcagaacgcccggccggtgcagccgctcaacggcagggtcgtcaccttctacaacccgcccaacagcaccatctccttcgacatgtgatcttacccccattagatggagtgctaattaacctagaaattaacgtgttactgtattcgtgtatcaccatcagcgtactgaccagctaatctcgtttttgccttgtcattatctcttcgctgctttactcagatgaaacattgtgac

SEQ ID NO: 8707 - DNA, 398 bp, Triticum aestivum
  unsure at all n locations
  Clone ID: LIB104-052-Q1-E1-A11
gacggagagagcaagcaggagtgtggtctacagtcacatgtgagagcaccaaggaagaggggaggctttgcagcacgcatgatcttgccagttctatcggtggctcttctcgtccttgtcagcgttgggatctatggatgggcataatagctctctttatggtgggatttaatgtgtcacattttccccacatcggctgtgatcattgtacatactgtgtcttgctgcctgcgtttaagacggttgtaagacagcgaagtgtttgttccccttcgggcgggggactgtgaaatgaagaagtgaggtaacaaatgagaagcgggatgaagcaaggagcaactgttgctgtanatgcctgtgacttagtacatgctagtttttgttttcctgtcatcaca

SEQ ID NO: 8708 - DNA, 439 bp, Triticum aestivum
  Clone ID: LIB104-052-Q1-E1-A12
ggtctagggttcccgggccgacggaggatacacaagcgtctaagcttggggatgccccagaaggcatcccctctttcttcaacaagtatcggtatcttttcggattcgtttcgttcatgcgatatgtgcaatcttggagcatcttttgcatttagttttcatttttcttttatgcaccatgctggcatgagatagtccttggttgatttatagaatgctcatttcacttcacttatatcatttgaagtttggatttcctgtttctctttacatagaaaaccgccatttgtagaatgttcttttgcttcacttatatttgttagagcacgggcatatcttttgtagaaagaataaaactctcttgcttcgcttatatctatttagagagatgacaggaagtggtcattcacatgattagtcataaaatcctaacataaac

SEQ ID NO: 8709 - DNA, 391 bp, Triticum aestivum
  Clone ID: LIB104-052-Q1-E1-A3
gttgggagccaagcgtcaggtactgtctatgatatcaattcaaaatttgaactcctaaatttctgcttgtgccttaccttctctcttgtatgaaaactaatttcagatgaatctccttgctcaaaggatcatatgatctcaaaacaataatgggctctgcattgctcttgtcaatacctctctcccttttgccttgtgacgctgtacttaattaattactatttaattatgtatcatcagtctgcacctgcgcttcattaacctttgtttcttccaatattatttgatctatatttactctttgcaaaatgtacaataatggcaacgcttataaagaattttctttggggaatttattgaattatccttccatcaacaatgagaagggctt

SEQ ID NO: 8710 - DNA, 419 bp, Triticum aestivum
  Clone ID: LIB104-052-Q1-E1-A5
agggcacacaacggtggcagtggcacgctaatctgatccgacccacgtagacctaatcatgcacgagagaaaccagatacaccgctccaggagataagatcgtggtttcttatctggatgttcatgggcttttattatggcattttaaaatcctttttaatgtgtatacaagctgagattggagggggaggggggcaactatgcttgtacgtgtgatttatctctctttgtgcgcaccgattcgaagtatcagtcgatggttggggggcttggcccctgcttgtccccccttgctccgccactgggaagacccatgtgtcacgataattttgttagatgatgtacaactcaatcgtctattcaccagaggtgtatcaaataagttgtatttgtctttgttctccttgacgggtaacacc

SEQ ID NO: 8711 - DNA, 436 bp, Triticum aestivum
  Clone ID: LIB104-052-Q1-E1-A8
ccgggtcgacggggtggaagtaggaaaatgtgtttgggctatcaaattttgtccctatccttttcggtagcaaacagttgtgttttgaactagagaggatacaagatgctctttgtggttcttccaagtacaagagtgcaaatggagagttccctggtattacttctgatccttgtgagcattggaagcttcaacaaactgcaatgtcaggattcctgatagagattgggtggttaataaagaagccttctccagatgaatttaaaaatttactgagtaaaacaaatgttaagagatggatatgtgtgttggagttcttgatacagaacaattttatcaatgttcttgaaatgattgtgaaatcatcggacaacatcataggctctgagattctttctaacctggaaagtgggcggttggaacatcatgtcacagc

SEQ ID NO: 8712 - DNA, 416 bp, Triticum aestivum
  Clone ID: LIB104-052-Q1-E1-A9
agataattcacctaatgatgtgatcccgttaatcaaataacaactctttgttcatggttaggaaacataaccatctttgattaacgagctagtcaagtagaggcatactagtgacactctgtttgtctatgtattcacacatgtattatgtttccggttaatacaattctagcatgaataataaacatttatcatgatataaggaaataaataataactttattattgcctctagggcacatttccttcagcgcgtagtaatttgtttcgataactaatagatttttgtaataagtatgtgagttctttatgactaatgttgagtccatggattatacgcactctcacgcttccacctttgctagcctctctagtaccgtgcaactttcgccgggtacataaacccaacatttatc

SEQ ID NO: 8713 - DNA, 157 bp, Triticum aestivum
  Clone ID: LIB104-052-Q1-E1-B1
atggagaatgtcagtgtgatatgtcaagtagtggacagataagccaaccactggatgtggttttgagggatttttgcagtggggtttgtagggtgctatgccgcgctgggtttgggatttgaaataaaacgaagggagatgtgccacgctcttaagg

SEQ ID NO: 8714 - DNA, 397 bp, Triticum aestivum
  Clone ID: LIB104-052-Q1-E1-B10
ccgggtcgacgggcctccaactggtgctcaggcttcgtggaggcatgcagattttcgtcaagaccctcaccggcaagaccatcaccttggaggtggagtcctcggacaccatcgacaacgtgaaggcaaagatccaggacaaggagggcatccctccggaccagcagcgcctcatcttcgctggcaagcagcttgaggatggccgcaccctggctgactacaacatccagaaggagtccaccctccacctggtgctcaggcttcgtggaggcatgcagatttttgtcaagacgctcaccggcaagaccatcaccctggaggtggagtcctcggacaccatcgacaatgtgaaggccaagatccaggataaggagggcattcccccggaccagcagcg

SEQ ID NO: 8715 - DNA, 230 bp, Triticum aestivum
  Clone ID: LIB104-052-Q1-E1-B3
gtgttttcacccttcttttgtgtaccctggagtctgtaatatcatccttgctgtggtgcatcgggtttgtgcacatcttccggtagagttcagttcgcttcccgtgttaaaactagtgattgtcatggagattactgtttaactgagataccgatgttgccatggtggatagaacaataatttatgcggctgagaaataatggcgttactctgactgtttttcacccact

SEQ ID NO: 8716 - DNA, 369 bp, Triticum aestivum
  Clone ID: LIB104-052-Q1-E1-B7
ggtcgacccccaactgcacttttctttctcgacgagtacctactggacaagcgtatttgtgttttcagccttgttttgggcaccgaggagcctggaatatcttacgtgctgtgctgctcggcgtttttgcacatcttccggaagagttcagttcgcttcccttgttaacactagtgattgtcgtggagatgactgtttaactgaaataccgatgctgcgatggtggatagaacaataatttatgcggatgagaaatattggcgctactgtgactgtgtatcacccacttatcttgtgatttgcgagcctatttggcaattggaaaaaaaaaagcaagcaaatcaccgaaccatccgaacgtcacgaacg

SEQ ID NO: 8717 - DNA, 442 bp, Triticum aestivum
  Clone ID: LIB104-052-Q1-E1-B8
aatgcccgggtcgacggggaggttgaaaagctgattggcaggatagtgaagtggctgaagcccggtgggcatattttcatcagggagtcctgcttccaccagtctggggattccaagaggaaagtgaacccgacgcactaccgggagccaaggttttacaccaaggtgtttaaggaatgccactcctatgaccaagatgggaattcctttgagctttctctggtaacttccaagtgcattggagcttatgtgaagagcaagaagaaccagaaccagatatgttggctatgggagaaggtcaagtgcacagaagacaaaggctttcagagattcctggacaatgtgcagtacaaatccactggaatcctgcgttatgagcgcgtgtttggggagggttatgtcagcaccggtggattcgagaacacaaaagaatttgtggaca

SEQ ID NO: 8718 - DNA, 404 bp, Triticum aestivum
  Clone ID: LIB104-052-Q1-E1-C1
cgggtattttgagagtcctataaaacagcatggtaatttgctttggctataaaattagtcctaatatgatgaacatccaagatgggtataataaaaactatcatataaagtgcatcgaatactatgagaagtttgatacttgataattgttttgagatatgaagatggtgatatttgagtcatgctagttgagtagttttgaatttgagaaatacttgttctaaagtttctgattcccgtagcatgcacatatggtgaaccgttatgtgatgaagtcgtagcatgatttatttattgattgtcttccttatgagtggcggtcggggacgagcgatggtcttttcctaccaatctatccccctaggagcatgcgcgtagtacttcgtttcgataactaatatatt

SEQ ID NO: 8719 - DNA, 302 bp, Triticum aestivum
  unsure at all n locations
  Clone ID: LIB104-052-Q1-E1-C11
ccgggccgacgggtatgcgacggagccggggtactcgggcctgatcatcgccggggtcgcgagtgttgtgagcctcgccatgaccgtctacaacatccggcagcgccctgtctttgcttagctgcggattattgagcatcttggaacctcaagagtggcgacctgaagaagggtcagacttgcccttgcctatggcagtttaatgttgctattatctgtcttctgttggatgtgttatgagtatgttgttggttaccaaggttctatatctaaaanaaaaaaaaaaataaaaataaataaaa

SEQ ID NO: 8720 - DNA, 210 bp, Triticum aestivum
  Clone ID: LIB104-052-Q1-E1-C2
tcgacggggtgacgatgcgtgtcgggaatggttccaaggtcgatgtgatcgccgtcggcacgctacctctgcatttacctacaggattagttttaaacctcaataattgttatttagtgctagctttgagcatgaacattgtatctggatctcgtttaattcgagatggctactcatttaaatccgagaaataagggttgttcaattata

SEQ ID NO: 8721 - DNA, 381 bp, Triticum aestivum
  Clone ID: LIB104-052-Q1-E1-C3
gctgcataccattcaagtatagagctgatgaaacttctggtgatgaacagaaaaaagttgttgaagttctcatgataaactcccaaagcggaccaggtttattattccccaagggaggatgggagaacgatgaaacggttgaacaagcagctgctcgagaagctatagaagaagctggagttcaaggagatatagtgcaatttctaggtttctacgatttcaagagcaagacgcatcaggacgcgtgctgccccgagggcatgtgcagagcggcagtgtttgcgctgcacgtgaaggaggagctggcctcatggcccgagcagagcacccgccggaggacctggctgacggtccccgaagccacgtcacaatgtcggtacc

SEQ ID NO: 8722 - DNA, 429 bp, Triticum aestivum
  Clone ID: LIB104-052-Q1-E1-C4
cggcggtgcggcaggcgcaggccgggtacgcggtgtacggggtggactacgagggccacggcaagtcggaggggctccagggctacatcccctccttcgacctcctagtcagcgacaccgacgccttcttcaccgccgtcgtcgcctccaccgccaacacggacctcccccgcttcatcctcggcgagtccatgggcggcgccgtggcgctgctcctccaccggatgcgcccggcgtactggaccggcgccgtcctcgtcgcccccatgtgcaagatcgctgatgagatgcggccgcatccggtggtggtgagcgtcctcaagctgatgaccaacatcatccccacgtggaagatcgtgccgaccaccgacgtcatcgacgccgcctacaggatgcaagagaagcgcgacgagattatggaacaacccc

SEQ ID NO: 8723 - DNA, 401 bp, Triticum aestivum
  Clone ID: LIB104-052-Q1-E1-C7
cggtcgacgggatatcgctagcaatatgaaagttatcttttcttcgacaaaaaaaaaaaaaaaaaaaaaaaaaaaaaaaaaaaaaaaaaaaaaaaaaaaaaaaaaaaaaaaaaaaaaaaaaaaaaaaaaaaaaaaaaaaaaaaaaaaaaaaaaaaaaaaaataaaaagaaaaaaaaaaataaaaagaataaaaaggaaaaaaaaaagaaaaaagcggggtttctaaaagtttaaaaacttcatcatatgatgacgggagtttaaaattttgaaagtttggaccaataatttttttgaagggtcgttttttaaaaaccggtaataggggaaaaacctgtgggttccccaataaacccgcttgttggaaaattaacttttatcaaaagggttataattgaaaa

SEQ ID NO: 8724 - DNA, 278 bp, Triticum aestivum
  Clone ID: LIB104-052-Q1-E1-C9
cgggtcgacggagtctctcatgcttcacttatattattttgagagtcttttagaacagcatggtatttgctgtgatcataaagttggtcctagaatgatgagcatccaagttgcgtataataaaaactatcctagaaagtgaattggatgctatgatcaatttgatgcttgataattgttttgagatatggaggtagtaatattaaagtcatgctaattgggtgattatgaacttaaagaatgcctgtgttgaaatttgtgaatcccgtaacatgcac

SEQ ID NO: 8725 - DNA, 386 bp, Triticum aestivum
  Clone ID: LIB104-052-Q1-E1-D1
cggcacatttaaagacttatggtactagcatttcttcttacgatggtttgttttcttcagcaaaatgcactgctataatggccgtttctcaggcctgttgttgttggcgaaaaaaaaaaaaaaaaaaaaaaaaaaaaaaaaaaaaaaaaaaaagaacaaaaaaaaaaaaaaaaaaaaaaaacaaaaaaaaaagaaaagaaaaaaaaaaaaacaaaaaaaaaaaaaaaaggggccccccaaaaggatcaaacctaactaacccgtgaatgaaacttaaaacccctccaaaagggccaccaaaattaaattaaagggcgtccttttaaaaaattcgtaacgggaaaaacccggggtttaccaaattaaacccctttgaagaaaatccc

SEQ ID NO: 8726 - DNA, 416 bp, Triticum aestivum
  Clone ID: LIB104-052-Q1-E1-D2
cggcggcgaacagcggcatcgcggcagcggcggcttggggctggggcggctaaggtttgcccgggccggtgtccaggtcgaacatggcccgtaggtcggtgcgtgtttttttaaaataattacgcgtagaagaaaaataaaaagaaatactaaacggactccaaaaattccgaaataaattttcacgggcttctaaaatcaagccgcacaaggtgaacatttatttggcacctaaatgcaattttgaaaaacacacatttttcctaaattcaaataaaacaccaaaaaaactccgaaacaaaatcttatttgattttattattaaatcctcaatatttctttattttgggaaagtcattttattcccactctcatatttttgcaatagaaataattgatgataaaataaataaaat

SEQ ID NO: 8727 - DNA, 423 bp, Triticum aestivum
  Clone ID: LIB104-052-Q1-E1-D4
cggcattcttacagagaaaggagtggtcgtgttgcctgatatctatgctaatgctggtggtgtgatcgttagctattttgagtgggttcagaacattcaaggattcatgtgggaagaagaaaaggtgaacatggagctccataagtacatgaacagcgcgttccagaacatcaaggccatgtgcaagtctcaagattgcaaccttaggatgggagcattcaccttgggagtgaaccgggttgctcgcgccaccatcttgaggggctgggaggcatgaggaattccagattccttatcgaataatccatgcccgacaccgtggtggatgacagttcttatatccaccatcattgatttggtaaattcatcataagttgccggcatgccaggagtccaattgagataattttcggtgtacatgac

SEQ ID NO: 8728 - DNA, 437 bp, Triticum aestivum
  Clone ID: LIB104-052-Q1-E1-E1
ggtcgacggcctgaataaaaaaggaacagttcgagtagtatctacaaatattaccgaaaacattgtgaaaatacttctacgagagggttttattgaaagtgttcggaaacatcaggaacgtaacagatatttcttggtttcaactttgcgacatcaaaagagaaagactagaaaaggaatatatagaacaagaacctttttaaagcgtatcagccgacccggcttacgaatttataccaactatcaaggaattcctaaagttttgggtggaatgggaattgctattctttctacttctcgaggaataatgacagatcgagaagctcgactaaacagaattgggggagaagtcttatgttatatatggtaatcgccccgcctatagtgctcgaattctatctcgcccttcctatttttaaaataaaaatagaaaaata

SEQ ID NO: 8729 - DNA, 423 bp, Triticum aestivum
  Clone ID: LIB104-052-Q1-E1-E12
ggtctaggacccccgggtcgacgggcatccccttccccaagtacaagacccggggcttctggacctaaaaggtataattctcaaccaaaaactgcacagacattagatgctctgtttctagtagcaagtttcagttgagcgtaagcataccaattactgctgtatttgtctacttgctgggaccatcttgttaccatagatgttttaactcaaggcagatcatgcaggggtatttatgtatttttattttctttagaggtttaccaccatgcatacatgatgactggcatcatgaactctatgagccaaactgcttaattgcaaccaatccttgggcacttagccaaaggattgtggtccaatctatcggtggtttaatcctagctacactatcagaaaaatttccctacttctataacaaaa

SEQ ID NO: 8730 - DNA, 445 bp, Triticum aestivum
  Clone ID: LIB104-052-Q1-E1-E4
ccggtcgagattcacgggtcgacggcgaagtacaacgacccaacatatatggtccgggcgtgtcgtgcaaatgcatctgatgccatcttgtgcactgtgcttggacaaaatgctgtccatggagcatttgccgggttcagcggcatcacatcaggtatttgcaacacacattatgccttcctcccgatcacagaagtcatcacaacaccgaagcatgtgaacccaaatagcaggatgtggcaccgatgtctcacgtccactggccaaccggacttccactgactcgcgttgagcgtttacttctctgcacaggctaaactcgtaatgaattaacatatttttgcttacccacagactagtcacagctgaaagattagtcacggtgcaagctaccaacatgttaacaataatgtaatactgagaatgaactcgatcgacttgtttc

SEQ ID NO: 8731 - DNA, 399 bp, Triticum aestivum
  Clone ID: LIB104-052-Q1-E1-E9
ttcccgggccgacgggggggggaaaaataatgatgacccctgagtccgcgaaacccaagggaaaaaaaggctaggtggcgaatggtaaaaccaatgttgggcattgctggaagagctttacttaaggcgaactgtcaaggggttcccattatagcccaaccgcgtaagcaacgcaaaatccgggaacataacaccgatatgacggaaactagggcggcaagagtggaacaaaacaccaggcataaggccgagccttccaccctttaccaattatatagatgcattaattaaataagatatatagtgatatcccaacaagtaaacatgttccaacaaggaacaacatctccatgttccaacaaggaacaaacttcaatcttcacctacaactaacaacgc

SEQ ID NO: 8732 - DNA, 319 bp, Triticum aestivum
  Clone ID: LIB104-052-Q1-E1-F1
cacggcgtgtgagtatcatccctaccttctccatttagcgcgcgaacgagacaatttgtggccatccgcgtgattggaatttcgatttgtaggctttcaatactactatatatgctacaaataacatttgtaggctttcaataatatttgtcttgcaacggggaaaaatcacttacaatggacaaaagagtcaggggtaccagatctttcaaagtgtaagatgcggtgacgcacagaagaagctcgcctcaattcgcacgtaatcccacttcactacgctgtcaaaatggcccctccatacaagtaaaaacccgtcgtt

SEQ ID NO: 8733 - DNA, 396 bp, Triticum aestivum
  Clone ID: LIB104-052-Q1-E1-F10
ccgggccgacggaggccgggaaagaaatgaggaagggcaccaagacaaccaccgcggctcgggggggcgagaagacgaagaatccccaggagatgatcacgacggtgatgctgtacacagtcatcatgtagaagatgcaggacatgatgatgatgctggcggagcagacgacgctggaccatcgatgggctgggtgcaggaccctcatattcaatagctgcttctcaagcagacggataacgcaagagctgccgcccgagagaaagccaagatggatcaacttgagttagacgcggttactccattgtatgaaggatgcaggcccgaggatacccgcctgaaagtaacgctcatggctctggagatgaaggtaaaacacaaaatgaccgacgcatg

SEQ ID NO: 8734 - DNA, 400 bp, Triticum aestivum
  Clone ID: LIB104-052-Q1-E1-F11
ccgggccgacgggagctgctactcattcgtcccttcctctccgctccgtccctttctctccgctgcgtcccttttcgccagatccgacgcccttccggcttgtcgttgcctcgccgccgtgacaaagttgggagaagggggttggccgtcgtcttgcggttgggccggagcagcggtgggctggacgccgcttcctgctgtcttcgagcgatgggagagggttagggtctgtcgtttgccgttcgattggtgactgttgcgggttggcagcgcgccgtgtagctgcgagacaacttccttgttgatctgccgtcctgctgcagtgttatatactgtcgaattccaaaaacgaggtctgccacacgcgcatatcctcatctggcgtaaaggagacaaagat

SEQ ID NO: 8735 - DNA, 418 bp, Triticum aestivum
  Clone ID: LIB104-052-Q1-E1-F12
cccgggccgacggaatcctaaagtagttgacaacataaactgaattgatttgttcacacccatcactgtagagtaacttgtgttgggtgatatacacacatgttgtcaaaaccaattttacccccaaaccgctgcttgttcagtactgaaaaaaaaattcaaaggtgggaaaatggcatagtgttttatttttaacaattttcttcctttaaaatccaacacttggagttcgaacacaatctaagtaccgagaaccttttcatatctcctcataagtacaacaaaacatcgatgacttaatttccaaatattacaaagtaaatacccgtaacttgaaatgaacatgaaacactgtcatagatcgctcgacgggcccagaccatcagcatccctaatcaactggataagaataaccaaa

SEQ ID NO: 8736 - DNA, 425 bp, Triticum aestivum
  Clone ID: LIB104-052-Q1-E1-F2
cggcgtccaatcatgtgcattatttggggaattggaccgagatacatcatagttgcttcacaactccatatttggtccagaatcaagatcaagatgatgcactcacatagagtaaccacttgagctcaaattcggcaaggcagcatgttttggacatataaagatgctgtaaaaatttcgtaccaaatggacttggcaaaatggaacttgcttcacaaacatcctctttgtccagaaacttgcaataatttttggggagaaaatggcttgattaaatgttcccaaatttggtggagagatgggatattggtaggagcatgatctagtaatttttcaaaaataatgaagcaatataaataacacttgcttcacaacctgaaaatattaacagaatataagatatgaaactgtgctcacatagatga

SEQ ID NO: 8737 - DNA, 447 bp, Triticum aestivum
  Clone ID: LIB104-052-Q1-E1-F3
ccggtcctagattcacgggtccacggcgacggaagagaagcagccgacgtctccgtcgccgtcgtctcgttcgtccccaaatcttcaccgagcttccgctccccgcagcaacgcggaggaaggaatggacaagtatcacagcaacacccgctttgcacccctgagagacgctccatttgctctccgtggtgcctttggtacctccaactcgtctttcaacaacatggatggccttagacactcctcaagcattgggcaagcaaggagctacacatcttctcccttaggagctctgcgacagaagattcctccatctggaaaccgatccctacatacaagtcgtcccctgcctgctcctgttgcgaaccgcccactgtctccccatcttcctctgaagaagccacagctgagcgctacgttctccatctcacaccgtatatttggcgt

SEQ ID NO: 8738 - DNA, 431 bp, Triticum aestivum
  Clone ID: LIB104-052-Q1-E1-F4
ggtcgacggcggatgtgaattttgatttaattagtgtttgtgccaagtaggacctataggataacctacgatgatagttgatttgattctgctgaaaaacagaaactttgcatgcacgaatataattatgataaattacaggaacatgcttttgcgttgattctttttgatactgatcaataaacaaattttcaggacttactagtttggtagaatttttagagttccagaagtttgcgttagttacagattgctacagactgttctatttttgacagattctgtttttcgtgtgttgtttgcttattttgatgaatctatggctagtaaattagtttataaaccatagagaagttggaatacagtaggtttaacaccaatataaacaaataatgagttcattacagtaccttgaagtagtcctttgtttt

SEQ ID NO: 8739 - DNA, 418 bp, Triticum aestivum
  Clone ID: LIB104-052-Q1-E1-F6
cgggcgaacatccggtgccccttagcgatcagctgaagcagctggtcgagctccacaaggtggccgaacaggccatgaagggccttatagtttggctgtggcccaaagaggccatgcctgggagctacttcggcctggtgcggcggctggtggatgcgtgtccctgggttgaagtcatcaagcactccgcctgcattgaaggtgcccatcgggcccttgcccgtgctaaagtgcactggggcaggatggacgctgagaagcttgtgacggacgcgccaccaccgggcaaggagtatcgcagcccgagatgtattataagggtgtcctgaagggtgcccgcattattgcgggtgagtgctccaaggatgtaatatttgagtagactcgcattttgttatcctgtgcgctgaaaactttg

SEQ ID NO: 8740 - DNA, 434 bp, Triticum aestivum
  unsure at all n locations
  Clone ID: LIB104-052-Q1-E1-G1
gggtccacggcgagacttatcgcctaggcggcgtaggtgggctcgagtgggccgaaggccaaggggtaaggggctgctcttttcttttcctttgattttttactttttatttaattttcttttctattttcgtttagtttcctgttttatttaggttctgctatcanatgaattttgttgaccatgtaaatttgcaaataacccacgcactatattttggggctgcacaaaatgcttccgggcaattggagttaatataaattatgattgtatttgaaagggcaaaaaaaggtgtcgttggtccattgtttaaaatccatgggtgtttttaaacatctccaaaaatatttcttaatgaatgagaattatgtagtgaatatttccaacctaaggaacatttttaatttacagtttttataaattctaatttgact

SEQ ID NO: 8741 - DNA, 409 bp, Triticum aestivum
  Clone ID: LIB104-052-Q1-E1-G10
ccgggtcgacgggaagtacaacaacttcggcgatggaagtcaagattatggggagattattaggataatcatgactttgatgcatggataagctagctacatgcgtgcgcgagttggttagtctatgcatggcgtgagttagctggttaagttgttagctacgtgcatgcatcgcatggatatgggtgcatgtggttgagatattctaggaggtgagtgtccgtgtgtgtgcatggatagagtttgttagactccaaaaaaaaaaaaaaaaaaaaaaaaaaaaaaaaaaaaaaaaaaaaaaaaaaaaaaaaaaaaaaacaaaaaaaaaaaaaaaaaaaaaaaacaaaaggaaaaaaaatacaacaaaggaaaaaaaaaggcaagaacaaaaaaaaaaaaaggggccgcc

SEQ ID NO: 8742 - DNA, 437 bp, Triticum aestivum
  Clone ID: LIB104-052-Q1-E1-G2
cggctggccgggacatgtatggatactgtacttggaattcttgcgagctgtgactgatgtgctgcaaatagaatgaccggccatgaattataaggtcgagcgatgtgcggttgtctcctccgtttcttagtttcgaatcagcaacgcgcgtttgctgatccgtaagctgcaccggagtttgtatccacgcgttttttatttcttcatagaaacgtttgtatccacgcgcaggcggtgacccacacggattttctcccaatgctccagactacacggaatgggtcaccaactttcagaaatgcatattgggccaggcctaatgaagcgaaccaacaggctttatttgggccggttcagcgtcttgaaagttttcaagtcctcaaagaaagttcttcatcgattaaaaaaaagatcttcaagggccaacctatattaat

SEQ ID NO: 8743 - DNA, 465 bp, Triticum aestivum
  Clone ID: LIB104-052-Q1-E1-G3
gtgacggtcctacattcacgggtccacgggcccagtagaagaattgttaaaattcactagagcatgataaaattctgatttttttacacaagattgatatacaaatttcccagtttgtactaatttttcacaatttttggagttatagaagtatatgaaatttccagattactacaaactgttctgtttttgaaaaattctgttttccttgtgttgtttgcttattttgatgaatctatgggtagtatcggggggtatgaaccatgaagaagttggaatatagcatatataacatcaatataaatttataatgagttcacaacagtacctaaagtggtgatttgttttattatactaatggagcttatgagttttctattgagttttgtgttgtgaagttttgaagttttgggtaaagttttgatggagcacgaaataaggagtggcaagagcctaagcttgggg

SEQ ID NO: 8744 - DNA, 430 bp, Triticum aestivum
  Clone ID: LIB104-052-Q1-E1-G5
atgcccgggtcgacgggtaatgaggatcgcattgtgaacttgtcatcagttgcccacctccatacatatccaaaggggattctgtttgatcagctcaatgacaagaaaatatacaatgataaaatggcctatggacaatctaagcttgcaaacatactgcacgcgaaagagctctccaggcggctcaaggaggaaggagctaacatcacagttaattgcgttcatcctggattgatcatgaccaatttgatgaggcattcctttgctctcatgaaggcaattcaagttgtcacctacttgttctggaagaatgtaccccagggagcggcaactacttgctacgtagggctcaaccctcagctgaagggtgtgacaggcaaatactttgccgactgcaacgaggagaagacgagcaagcatgcgaagagcg

SEQ ID NO: 8745 - DNA, 444 bp, Triticum aestivum
  Clone ID: LIB104-052-Q1-E1-G6
ccgggtcgacggggaatgatagttgctttggaagaaaataatgatatgcatgaatctatagataattatgattccgatgatttgattgaaatatcccttgatgaacatgatgcttgctattcttatggccatgataccaatatttatggagatgaatttgctatagtttctgatgttaaacatgagattgttgccattgcacccatacttgatagttccttgaatcgaaagcatgattgcgatgaagttattataaattatattaatgtcaattgtgttaatgatatgcaaaaccctaagcttggggatgctagttttgctatctctactatttgttgcaatgatcatgattgggatgattcttcttatgatcttgaaaatttatttaagccccatgatgaacatgagattgataataatgtttgtaataatatttaaaatggg

SEQ ID NO: 8746 - DNA, 438 bp, Triticum aestivum
  Clone ID: LIB104-052-Q1-E1-G8
gggtcgacggggatggctatgattaccaacttgtaacgcccacgacgcggctatatctcccacgtgtcgaggcacgacttagaggcataaccgcatagtggttttgtcgcaagaagggtcatcttcacacaatcccatgtaatgaacaagaatgggataaagagttggcttacaatcgccacttcacacaatacatgaatataattcatacatcatccgaaatacaaacatatagaccgactacggtcaaaatccagatgaaaataagacaaccccaaatgcttgatccccgattgtcccaactgggctccactactgatcatcaggaaaagacacatagtaacgaccacgttcctcgtcgaacgcccacttgagatcgaccccatcgtcggcaccggcatcgtcggcacctgcaactgttttggtagaatctgtgag

SEQ ID NO: 8747 - DNA, 411 bp, Triticum aestivum
  Clone ID: LIB104-052-Q1-E1-H1
cacggcacttcaatataaaaaaaaaaaaaaaaaaaaaaaaaacataaaaaaaaaaatattaaaagcaaacaagtatgaaaaaaatacaaaaagtcccaaccactaaaaagataaaaaagtcaaaaaaaaaaccggccgcccaaaaggttcaacactaatttacccttaaatgcaacgtaaaacccctccaaaagtgccaccaaatttcatttaacgggccttcttttaaaaaatccttaatgggaaaaaccctggcttaaccaacttaaatccccttgaagaaaatccccttttcacaaacgggggtaatatcaaaaaggcccgcacctatcccccttccaaaaatttgcccaccctgaatggcaaatggaacccccccttaagcggcccataaaccccggggggtttggt

SEQ ID NO: 8748 - DNA, 407 bp, Triticum aestivum
  Clone ID: LIB104-052-Q1-E1-H10
ccgggccgacggacaacacaggtcgcgtaatcctggacctgaaacccggcgagtaccgtgagaagatcttcctcaatctcagcaagccctacgtcactttcaagtccgatcccaagaacccggccatcatcgcctggagcgacaccgctgcgacgctagggaaagacgggaagcccgtgggcacggtggggagcaccacttgcgccatcgagtccgactacttcgtggcgtacggcgtggtgttcaagaacgacgcgccactggccaagccgggggccaagggcgggcaggcggtggcgctgcgtacgttcggcaccaagcaggccttctacaactgcaccatcgacggcgggcaggacacgctgtacgaccacaagggtttgcactacttcaaggactgcgtgatt

SEQ ID NO: 8749 - DNA, 414 bp, Triticum aestivum
  Clone ID: LIB104-052-Q1-E1-H11
ccgggtcgacgggacctccatggccgccaccccttgctcctatataagtagatccgtctagtagcttttccttgggttttgttgagttaaaagttagccagtgcaacttcgtgtacttcgtttgtgtccaacgaccagaccaagaccgcttacggatccccaccattataaatacttcatatatattcgcaatatgcagattgctttatcatattcttgctcgttcttcgattgcttgcaggaatagaccttcgtggtcaggttgatcatgctccagcgtggtcaataacctctcggagttggtttagcgattgctaaggcgcaacatcgtgcacgtttgtagtcggatcgtcaaagtcgtctccaccaaattgatagttatcatctcatcgaaagattgggacaaccccgcct

SEQ ID NO: 8750 - DNA, 386 bp, Triticum aestivum
  Clone ID: LIB104-052-Q1-E1-H12
gggccgacgggccggcatcccctaacaaggagataaaccaacaaactgtggtgcctcagcgaaagcaagcgaggtttgtgctaccaaagagcgcccaggtggacgccgaggcgcggagcgagctgcaggacctgatggacgcaagggaggctggcatgtccttcattctgggtcactcccacatgaaggccaagagcgggtctagcttcgtgaagcggatcgtgataaacttcttctacgagttcttgaggaggaacagccgtggcccgtcctatgccgctaacataccccatgcttccaccttggaggtaggaatggtctaccaagtctgatagtagcagctgtgtgaaagttttaagttagagagatcagatgaagtgttgttt

SEQ ID NO: 8751 - DNA, 407 bp, Triticum aestivum
  Clone ID: LIB104-052-Q1-E1-H2
ccgggtctacgatcaggactacaagacatacgtctcggttattgttcggggagataaggcaaaatatatttaccaaaagtacttttgttcacttacagcttagtggagggctgacccccttgcgggcactgggcggcaaggacgccctccgaggcagggcctcctggcgagggtttcttctctcgtttggaaacctttgtttccaagtcttcaggggtggtccttttccttccttcggaagagggaatttcggattcttctcctcgattatcctccttcgtggagatactaattctcctggtttggatgagtaatacgtgaggctcgcttttggcttcttcatctctccttttatcttcccccgagggcacttgataaggtatgtactccagcatcctggctagtat

SEQ ID NO: 8752 - DNA, 371 bp, Triticum aestivum
  Clone ID: LIB104-052-Q1-E1-H3
cgggtccacggcgaccacaaagagaagaaggacaagaagaagaagaaggacaagaagcacggcgagggccacaaggacgacgacggccacggcagcagcagcagcgacagcgacagcgactgagccagctccggccgcgctccggcagcagcgtgcagtgtaggcgagatcgatgaacgcttgggagaagtgtggcatacatatatgttgcacggtttggagcgtgtggtagcatatgtatgtaatgcgtgacatgtctcatggatcttgtgatgtataataattagccggctgcactgcactgcacggtgcttgtaataataacgttaatgaatcatgttggtattgatgcaaaaaaaaaaaaaaacaca

SEQ ID NO: 8753 - DNA, 406 bp, Triticum aestivum
  Clone ID: LIB104-052-Q1-E1-H4
atgaacatcttcaccaaaggaggctctcctgctaggcccgttctctgatggagtcgcttgcctcgcaagcgaagccggctgccgtgctctggctcgccggcttcctccaggccgcgcgtctccaccgcgtcgtctccttctgcgtcagctccagggctctgtcgatcagaatcgctcagtgcttcctgctcaacgggttcatcttcctggggagcttgctaaccttgaaatcggtggtcattccaactcttctatggatactgcccgagcaatgcgatcaatcatggggacaacatctatgtgatcacacaacagctgttgccttgtattcgttcttacgttcggggcttgtcgagattttctatgtattttggttttatcccctctacatcttcagctttataat

SEQ ID NO: 8754 - DNA, 405 bp, Triticum aestivum
  Clone ID: LIB104-052-Q1-E1-H6
cgttgagctgcatctgctgtattgagctgccgaggtctgctatgttgagccgccgaggccgcgttgagccgccggggctatattgagtcaccggtctgcctgagccatttctgttgcgttgaacggatcatcgatcatccgaacaaatcaggtgatatccatctaagtttgttttattagcacatattgctttttgtcaaaaaacagtttatctttgccttggtctgcaatattgttgatgcaggacaattgttcactacatcaacacgacgtggctaacttacccatccgcctggcttaccgtgtctgtgattgacttgcctgtctgcactggcttacaacaccgtggctgactcatctgtctatatcgtctctgatgttgccgtcgtccttaacgttcgtcct

SEQ ID NO: 8755 - DNA, 330 bp, Triticum aestivum
  Clone ID: LIB104-053-Q1-E1-A1
ctcatcgatagacgggacacctttgcctctatcaagtggtatcagatttccaggttgctcggtgagattttacagtttttcgtagtttatatcgggtcagttcgtcataccgatagtccacgaatcttccagacaaaaaattagggtcagttcatcttaacggaaccaatctaagccgttgcataatctttttagggttttgcgatgtggaatttgcggttgcatcgtcgtttctaactgctgggcgtacagtctagtcctttacactttcgagttctggtcataagttgtcaagtcgctgccgcaccatcatcatcaatcctgtcatct

SEQ ID NO: 8756 - DNA, 248 bp, Triticum aestivum
  Clone ID: LIB104-053-Q1-E1-A10
ttccctgggttttgttgagttaacagttaaccagtgcaacttcctgtacttcgggtgtgtcgaacgaccacaccaagaccgcttagggatccccaacattataaatacttcaataatattcgcaataagcagattgcgttatcatattcttgctcgttcttcgattgcttgcaggaaaaaaccttcgtggtcaggttgatcatgccccaccctggtcaataccctctcggacttggtttagcgacttt

SEQ ID NO: 8757 - DNA, 362 bp, Triticum aestivum
  Clone ID: LIB104-053-Q1-E1-A12
gttaatgggctccctcacggggccaccgtgcgccgagaacgtctactggaacgtcctgggcaaggtgaggcagatgaccaaggagcagatcgacctcgtcaccgcgccgctgccggccgccgccaagcagaacgcccggccggtgcaagcgctcaccggcagggtcctcaacttctaaaacccgcccaacagcatcatacccttcgacatgtgatcttacccccattagatggggtccgcaataacctagaaattaaccgtggtactgtaatcgtgtatcaccatcagcgtactgaccagctaatctcgtttttgccttgtcattatctcttcgctgctttactcagatgaaacattgtgac

SEQ ID NO: 8758 - DNA, 347 bp, Triticum aestivum
  Clone ID: LIB104-053-Q1-E1-A2
ggaggacctatgcgagtctaactttgtattctgacttgaatgagtagtgttgtgctcagcttggggatgacctatgagattcttagctagaattccgatgtgcatgtccgaataacgaagggaaatctgtcttgagggcaaatacttcgggtcagggaaacttgacattatcagacgcataagtcacaggccagaaaatcagtaacgggatatgataatcatcgctctaactgaaatcactatcttctgtgggaatggccaatccgaatgttctgaagcattccttgaagcagtcgctaagtccgtcgagttccagcagtccagatgcggacatcctcttggcttaa

SEQ ID NO: 8759 - DNA, 368 bp, Triticum aestivum
  unsure at all n locations
  Clone ID: LIB104-053-Q1-E1-A3
cacgggtaaggaaagcagcggcaagtgcaccacaggtggcaaatgtcattgctcaaaaagaaggaaattacgaattaagaggtcgattaaagtgcccgccattagcaacanaatatctgatatacctccggatgaatactcatggcggaagtacgggcagaagccgattaagggttcccctcatccgaggggctactataaatgcagcaccgtcaggggctgcccggcgaggaagcacgtcgagcggtgcgtggacgagccggtgatgctcatcgtgacgtacgaaggcgagcacagccataaccggctgccaacacaatctgcccagacctagacgacaaccggccgatcgcttcgccgcccctttt

SEQ ID NO: 8760 - DNA, 409 bp, Triticum aestivum
  unsure at all n locations
  Clone ID: LIB104-053-Q1-E1-A6
cccgggccgacgggaaggaaaatccctataaattagggatttgtctgatttgggtaggggttggactatatatacatgggaaaaaagggagttgaatcatccgatgaaaatccgacggtcaagaatagataggctatgaaagtctaaataagaaacggagacgttttgtacatgtttggggatgatccggacacaacggtgacgactgcccgggtcgggtccgggaaaactttcggacgcgcgcgcgaggatggccgcgggctgacgagagagcttaagttggatctggcggtangtagtgggctgtgtaaacggtctcgagctaagagaagagaagagatggaggcccggcgactgtttccggagaccgaaaacgttcgacgtgtgacccactatattgtcactatag

SEQ ID NO: 8761 - DNA, 420 bp, Triticum aestivum
  Clone ID: LIB104-053-Q1-E1-A7
cggaaatggcacttgctcgatcgtcttgttgccgtattgttgtaggaggtccatatgatgtggtacctcatagcttgtctccatgactgaagggaaattcccattctcggccatctttcttgaggggcttccgacgatggaagtgtcaccctcgctcataggtggtcgccttgttcttgaagatgtcaatgtatgcgaactcatgggaagtaggcgaagatgtcgtacgtccgaaggcgaagatgccttgataacacttggcaaagatgtcgaagtggttggtgtagccgtaactacgtcttggtggtgctcgtctcgcggtcttctctttttctcatgaagcttcgccttggcgtgtagtaaggctttttgggacttgtgcatttgcgtttgtggagcatcttcaagatgataatgtca

SEQ ID NO: 8762 - DNA, 414 bp, Triticum aestivum
  Clone ID: LIB104-053-Q1-E1-A9
acgggcgcccaaatgatagctgcaacgatgttttcgttgttgttcagaggagaaaagttaagacttggtcaaaacattgctgaagaaaaactgtgtattgctcacacctcacaaacaggaatactagtcgagctgcttggtcccaactgtcggccgcttcttgtgcaattctcgcgtttattgacgacataggttgacaatggtgtgggaccgtgatgtcaggaaaccaggaggaagcaaaaaaattattgttttatatactaataaggaggcacttgcgtacgtgcggctatggccctggtgggtccccactgtcatcctctccaagtaaagtcatctcctcatcctcatgttcgttgaccatgttgataacgcgagacggctatgccacgacgaacgcaacaactccaaaga

SEQ ID NO: 8763 - DNA, 382 bp, Triticum aestivum
  Clone ID: LIB104-053-Q1-E1-B1
gaaacggggttcatcagcatgagcatcataattttccatgtaaatactactgtccatatcgacaatagtttccccaatttcagacataacggcagaaagtgcgaggagcaggaagaaagaaggatgcgaacggaaaagagagggcgaataaaacggcaagggtgaactggacgagaggaaaacgagaggctaatggcaaataatgtcatgcatgagataagagtttgtgatgggtacctggtatgttgacttttgtgtagactccccggcaacagcgccagaaatccttcttgctacctcttgagcattgcgttggtttcccttaaaaaggaaagggtgatgcagtaaaatagtgtaagtatttcccccagtttttgataac

SEQ ID NO: 8764 - DNA, 389 bp, Triticum aestivum
  Clone ID: LIB104-053-Q1-E1-B10
gacgggcgacggcagaggcgcccacatcaacctcaaggtcaaggggcaggatggcaataaggttttcttccgcatcaagagatcgacacagctgaagaagctgatgaacgcctactgcgaccgtcagtctgtggatctcgactccattgctttccttttcgatggtcgtaggctccgtggtgagcagacccctgatgagctggagatggaggaaggcgacgagatcgacgccatgcttcaccagaccggagggtgctttcctcgcccttagaaggagcttgcttgcagcctggctgttctatgtcgtatgctacctttagaactagagtaaaatgtaagaagtgaaagaacttgtgaggctatggttctgtgccataacctgagggggt

SEQ ID NO: 8765 - DNA, 350 bp, Triticum aestivum
  Clone ID: LIB104-053-Q1-E1-B11
cacaagaaggaaggcgagcacaagaaggacggggagcacaaggagggcatgatggagaagatcaaggacaagatcagcggcgacgaccacggcgacggcaagaaggacggcgagcacaaggagaagaaggacaagaagaagaagaaggacaagaagcacggcgagggccacaaggacgacgacggccacggcagcagcagcagcgacagcgacagcgactgagccagctccggccgcgtgcagtgcaggggagatgaacgcgtgggttaacttggagcgtgtggtagcatatgtatgtaatgcttgacatgtctcatggatcttgtaatgtaataaccggctgcactgca

SEQ ID NO: 8766 - DNA, 402 bp, Triticum aestivum
  Clone ID: LIB104-053-Q1-E1-B12
gacggctgagcaaaatacagcttcacattgcaacgctcgtaggctaggtattcaatatagagtccaacctatggctagcatgtctacattacaagtaaggtcacttaatgccatgtgtaatgttgagatgttgccatcactttcatgctttgaagttttgcgtgtcctagctttggaaggcccctatgattcacaccatcctagtcatcttgagcatgttggaaagttagttcacttgaggcacctcaaactatcgagcatggatatcggtgagctcccaaaggaaataggatatctaaagttcttgttggtattggacttaggtagaaatagcataagtgaacttccagagagtattggttgactaagtcaactcaagtgcttgaacatatgcgaaacaga

SEQ ID NO: 8767 - DNA, 405 bp, Triticum aestivum
  Clone ID: LIB104-053-Q1-E1-B2
cgggtagcgaggcgctaacgctcgctacagacttacatgtccagtccatatgtgtggccacagattgcctagaagtggtgacaaggatcaaggatgacttcccatgcatgtttttcccaattctgcaagatatcaagcatcagagaagagctttcagggcagtagagtttatccatgagagtagaagacataatggagaggcgcatgctttagctaaggctgccgcatcactccctcccgggcgccatgtgtggctttcttctatgcccgatattatctgtattccaatgacagtttatgcttaagaaaggatacagattatgctaaaaaaattgtcttctttaacgcgttacaaatataatctttaaacaagatgtcgcttaacaaaatatcgcattttttgtc

SEQ ID NO: 8768 - DNA, 363 bp, Triticum aestivum
  unsure at all n locations
  Clone ID: LIB104-053-Q1-E1-B3
acatccacatcatcatcctccaccccgagcccgacaccaaatccgtcgagccccgtgcagtgtcngcccccaccggggcttcctcttctcgggccacaacgttgtctggatcaccctcccatgcaccatgggcgtctagaggtctgcgaacgtctcttcaccgcacatgactgctagtacctcgtcatagttgctggaggagtaggagcctcgcttgaattgctaaatgggtagagctttcaatgaagtggtggagcggttatgtaggttggcaggtggagatgaggacaatcacctatgtacatggtgttcgcatgacggtcgcccccctaggcaagggggcatgtggtanggcccatgcat

SEQ ID NO: 8769 - DNA, 404 bp, Triticum aestivum
  Clone ID: LIB104-053-Q1-E1-B5
ggtgatcgtggagaaaatcaaggacagcgagtgggagtttggatacaacgcgatgaccgacaagcatgagaacctggtagaggctggcgtcatcgaccccgcgaaggtgacgaggtgtgccctgcagaacgcggcgtcggtggccggaatggtcctgaccacgcaggcgatcgtcgtggagaagcctagcaagaaggcccccgcgcccgccgggatgccccagggcatgatgtagaagcgcaatgatacgtagcaacctgggggcatgcaattttaggggcagtgggagtgatcatttctccaagggagataactgtgggtacctcgagaaatcattggtgtgtaatggatagtgatgacctgttctattgtctatttggtaccgctaataccgtgaaaactat

SEQ ID NO: 8770 - DNA, 406 bp, Triticum aestivum
  Clone ID: LIB104-053-Q1-E1-B7
ccgggccgacgatataaccaacatgcttgacttcagctctgaagacatcgatggcatggatgacgatgtaggagacgaacaggaaccagcacctatagggcgctggaaggccacctcgtcatatgacatatatatggtggatactccaaaagatggagatggcgatggaacagtgggggatgacgcccccaagaaacagccgaagcgccggcgtcagcggcgccgctctaaatcccgccaaagaaaaaaacggtgattctggcacgggagataatactaccccggatagcgccgaagaacacccacctcagcaagattcagcacaggaagatggagaagccagccctcatgagagagcggcagaccgagaggtcgaggatgataactatacgcctccctccgaaga

SEQ ID NO: 8771 - DNA, 448 bp, Triticum aestivum
  unsure at all n locations
  Clone ID: LIB104-053-Q1-E1-B9
attcttgggccgacgggcgcgcaaagaacacatcctcaccagcgtagcttctccggcgtccggccaacgcgctcactagcctcccgccttcctccacatctcctcgcctccaccccatccagttcgtgccattcgctgctccaagacaagggcatggcgctcggcggctgcggcaacgaagctgatggtgcacgagccaaccatgaaggcagtagcacggggcagcgacagcagcatggagggcgtcctcttgtttgggaaggtaatggaactgcaaataggagtggcagcggcgaccaggatgcaaatggaagtggttcccaaagaccttggaaagaaatggcacgtgagcaaaggatatcaagaagcttttggatgttgggaagcttggagctgatgcttcanataagctgatggttgtcttttggctgtactggactatttaaac

SEQ ID NO: 8772 - DNA, 414 bp, Triticum aestivum
  Clone ID: LIB104-053-Q1-E1-C10
attcacgggccgacggcagagcttataaaccatagagaagttggaatacagtgggtttaaaaccaatataaataaataatgagtacaatacattaccttgaagtggtgttttgttttctttcgctaacggagctcacgagattttctgttgagttttgtgttgtgaagttttcaaattttgggtaaagatttgatggattatggaacaaggagtggcaagaacctaagcttggggatgcccatggcaccccaagataatctaaggacactaaaaagccaaagcttggggatgccccggaagacatcccctctttcgtcctcatccatcggtaactttacttggagctatatttttattcaccacatgatatgtgttttgcttggagcgtcttgtatgatttgagtccttccttt

SEQ ID NO: 8773 - DNA, 426 bp, Triticum aestivum
  Clone ID: LIB104-053-Q1-E1-C3
gtggcaactggcacctgggatccaccatctggttgcaacaactggaaagaaaacagaagggggggaaagaggtagcaaagcaaccgtgagtactcatcctaagtactcgcaagcatcagatctatactaagtatgcattggtatcaaatggaaaggttgtatctgtgcactgaactgcagaatgccagaagagaggcgaaagcctagcctatagaagactaggatcttgaagcagctccaagcatcttgcaatatgtagaagagtgtgacaccccaaaagtttggccttgtttttagttattaaaatgttgccaggaaataaaacttttccaattgtcaagttttacccttttgtgattttggatttatgcctcttgtgggaaaaaacttcaaagtgtatctttgacttgtgtgccctcttaaaaa

SEQ ID NO: 8774 - DNA, 413 bp, Triticum aestivum
  unsure at all n locations
  Clone ID: LIB104-053-Q1-E1-C4
cgggacaacatcaacaacaagctgcagcttgtcatgaagagcggcaagtacacgctcggctacaagaccgtcctcaggaccctcaggaactccaaggcaaagcttgtgatccttgctaacaactgccctccgctccgcaggtctgagattgagtactatgctatgttggcgaagatcactgtccaccactaccatggaaacaatgttgatttgggaactgcgtgtggtaaatacttccgagtctgctgcctgagtatcatcgaccctggcgattccgacatcatcaacgcaacaccagctggccagtaaacctgtgtatgccattttcagtgtctcgtctgatgcgtcatctaaggtggttctagagtgtanttcttgctggacttgatttggtcctgtgtacatcatttatc

SEQ ID NO: 8775 - DNA, 181 bp, Triticum aestivum
  Clone ID: LIB104-053-Q1-E1-C5
cccacgtcgttgcttccttcatgtggatattcttctagtattacagtgcctcccttgtatatatcttcgtctgcttgtcaatctcttgaccaccacgtgggtttttattgttagttgatatgtggtactggagatactgattactgaaccgatctcttggttggaaagggaaagcgcgatg

SEQ ID NO: 8776 - DNA, 433 bp, Triticum aestivum
  unsure at all n locations
  Clone ID: LIB104-053-Q1-E1-C7
ccgggccgacgggagacggaggaggcgcccacatcaacctcaaggtcaaggggcaggatggcaatgaggttttcttccgcatcaagagatccacacagctgaagaagctgatgaacgcttactgcgaccgtcagtctgtggatctcaactccattgctttcctttttgatggtcgtaggctccgtggtgagcagacccctgatgagcttgagatggaggaaggcgacgagatcgacgccatgcttcaccagaccggagggtgctttcctggcccttagaaggagcttgctgcagcctggctgttctatgtcgtatgctacctttagaactagagtaaaatgtaagaagtgaaagaacttgtgaggctatggttctgtgccatagcctgagggggggtctggangtgaaacaacatcggagtactggtgatgtc

SEQ ID NO: 8777 - DNA, 396 bp, Triticum aestivum
  Clone ID: LIB104-053-Q1-E1-C9
aattctagggccgacgggagagagatgcgtgttactaatcagaatgttattacgtttatccaccttgttgccaaccatcgattaaactatcagatccgtggacaaggtaggcattttctaagaggttttcaaaaacttataccaaaggaatggattgatatgttcaatgaacatgaaattcagcttctcatatctggctctttggaaagtttggacattgatgacttgcgcttaaacaccaactattctggaggttatcatccggaccatgagattatcgatatgttgtgggaggttctaaagagcttcagttcagataatcagaaaaagtttctcaagtttgtgactggatgttctcgcgggccactccttggatttgagtaccttgatcctaaa

SEQ ID NO: 8778 - DNA, 406 bp, Triticum aestivum
  Clone ID: LIB104-053-Q1-E1-D12
attcacgggccgacgggctggataaccaagggattgttggccttcagaggcaaatcatgaaagaacaagatgagggtcttgagaagctggaacagacggtgctgagcacaaaacacattgcgctagcagtcaatgaggagcttgacctgcatgcaagactgattgatgacctagacgaccatgtggatggtacgaactcgcgtctccagcgtgtgcaaaagaggcttgcggttctgaacaagcgcgccaagggcggctgctcctgcatgtccctgctgctgtccaccgtcggtatagtgatgcttgtggttattgtttggctcctcatcaagtatctgtaacctctgcccaactcaaatcagtttcaagtgtgcagctctttcaaagatagtatggttacttccgc

SEQ ID NO: 8779 - DNA, 395 bp, Triticum aestivum
  Clone ID: LIB104-053-Q1-E1-D2
acgggatgaagcattggacaaaatatacaagatgtcatgatagaggcgagggtgtcccgatctttcgatgagatgataactatcgatttggtggagacgactttgatgatccgactacaaacgtgcacgacgttgcgccttagcaatcgctaaaccaatctcctgaggttactgacgatgccggaagcacggtcagcctgaccacgaaggtctattctgatgaggacatgactaccttggatatgaccaaaaatattgcatatatgcatatttgtcaggtgatttctagtgcaaactattcaataatctatttatgttatccagaacaaaaatacttcacacacttttgtgttttgtctaattgcaggtgtatgggacatttgtacaatccacat

SEQ ID NO: 8780 - DNA, 395 bp, Triticum aestivum
  Clone ID: LIB104-053-Q1-E1-D4
gatgccatcgatactgccatccaatggctggacacgaaccagctcgctgaggtggatgagttcgaggacatgatgaaggagctggaggccctgtgcaaccccatcatcgccaagatgtaccagggtgctggtgccgacatggagggcggcatggacgacgacaccccagctgcatccggcggccctggccccaagatcgaggaggtcgactaaacagtcagttgttctgttgcagaggcggcgaagcctgctgcttattataccgtgtctgtgttatctgagacttgaggttgtggtggttattgttttgcttccgagtggtcggagttattccgtgcgagttgcaacattcgtggtagtggatcaacggttatgatgtctcacgtcaaagtata

SEQ ID NO: 8781 - DNA, 426 bp, Triticum aestivum
  Clone ID: LIB104-053-Q1-E1-D5
ccgggccgacgggatcttgaagcggatggatctgtgccgcaagtacgcttttggcaagatgctcgtgattggttctgaggcgcccttcaaagtcaaggggctgtggctcttccgtgggcaggacatccctgagttcgtcatgaatgaggtctatgacatggagctctacgagtggactaaggttgacctctccgacgaggcccagaagaagcgtgtcgaggccatgatcgaggaccttgagccgtttgaggggcaggccttgctggacgccaagtgcttcaagtaagcgaacagtgcctgggatcgtgatggcggtggcaaagaaactatctaggacttgaaattcagtgtcgaaacagttggtcttttttttggaagagtttgcttgttacttaatggctatttgacctggtgaactagttaatt

SEQ ID NO: 8782 - DNA, 417 bp, Triticum aestivum
  Clone ID: LIB104-053-Q1-E1-D7
tcccgggccgacggggagagcaactggcggagctgtacccacgtgaccaccgtgtgctgagggacctggcgctccggtcggagtacctggtcggccagaacgtcacgctcgatgtcgctcggttcagtggcgccttgtcccgtgctctggagcttcttcaccattagaagacactccacagggcgtagattgtttacaagataattagtcaagtgttttactactgcagtaaaataaagggtctggctaaatcatgtgtgagctgttggatcgctgtcacacggtcagaaggcaaattcgaaggctaatctagggactaaactctctcactcaactaaggattagcaattccataagatatagtgaaacataacacaaattggaacaaccaaggttgaatcaggtatctcttcagat

SEQ ID NO: 8783 - DNA, 384 bp, Triticum aestivum
  Clone ID: LIB104-053-Q1-E1-D9
acgggagctgtatgcggtggtgtcataaggagcctgtccatctccactagagttatcccaagtttcacttcacatcgtgatgttgttttaccttttttttcttgtcgtcgtcccgctgcctgctataacggacagcgctccctgttggcgccgccgccggcgggggtggtgccctggcggcggagggtgtatgtcctctgccgccgggtgctcccctgcttgtacctagatggttggttactctttccgtccattgtcaccggctaacattgtgataatatcagtctgggtaatgttagattaagctgttgtttgtgtcccaaaaaaaaaaggccgtccatttacaaaattctaacaggaaaaaaccgaagagtcacgcaactt

SEQ ID NO: 8784 - DNA, 204 bp, Triticum aestivum
  Clone ID: LIB104-053-Q1-E1-E1
gtcggtattgcagatggcttggcaccaacactgttcaattcagctccccaggttgcgttgttctcttcccgggggcctgatgtaaaagattttagcttccaagatgctgatgttctcaaagctgatatactcgctcatggtaatcacatatggtccgcatgggcacctaatggaacagatgtattacactacgcttgggaagga

SEQ ID NO: 8785 - DNA, 395 bp, Triticum aestivum
  Clone ID: LIB104-053-Q1-E1-E10
ccgacgggcgacggcggaggcgcccacatcaacctcaaggtcaaggggcaggatggcaatgaggttttcttccgcatcaagagatccacacagctgaagaagctgatgaacgcctactgcgaccgtcagtctgtggatctcaactccattgctttccttttcgatggtcgtaggctccgtggtgagcagacccctgatgagctggagatggaggaaggcgacgagatcgacgccatgcttcaccagaccggagggtgctttcctcgcccttagaaggagcttgcttgcagcctggctgttctatgtcgtatgctacctttagaactagagtaaaatgtaagaagtgaaagaacttgtgaggctatggttctgtgccataacctgagggggtctgg

SEQ ID NO: 8786 - DNA, 338 bp, Triticum aestivum
  Clone ID: LIB104-053-Q1-E1-E11
tagcgtccaaattcacggtcgacgggttcgaccacccaaccgaccccaacgatggatccgggtacggaggaagcacgaatcggtcactgcagatcctgcatgggctgaaactttgggaataaagtcaaccaccaaggcaaggttccccgaatttaaaaccttctttcccccccccgtaattccactttgaaattgtccatcccccaaatttcccccaaaggttcccccaaacttttttccccgtaaactcacacacccaatgtgtgttaaatatcccctttttccccgtgttgccccggaaatttctctcccccaaatttctctcacaggtttctcgt

SEQ ID NO: 8787 - DNA, 343 bp, Triticum aestivum
  Clone ID: LIB104-053-Q1-E1-E2
ctggagatggctgacactgtgtgctcgtcgtcgaatcgttctgtgctatatctggtgggcgttgccggcgcatgccaactcgttttaagtggccgatggcggacgctgcttcagctctacattcttgtttgcttggacggttgagccccgataatcgccttccactttctacccgccatctccgggctgcccgggtgaccagtgtcgtggagatggtggctgccatgcagtaagtcatgcatcatgtcatacactagtgatgcacattgcatgtcttgaataagacggaagagtgtcttgggcctccgtatacaatgagattccctttcacacatgatttcca

SEQ ID NO: 8788 - DNA, 381 bp, Triticum aestivum
  Clone ID: LIB104-053-Q1-E1-E4
gattgtatccttacggacagcccaggacagcaacggggtgcttaactcgtgggcgtcgaacctggagaagctgctggacctggtggagaagagctgccaccaaatacacaaggagacgatgatccacaaggcggtgctgagagcctgaagtgaaccattttgaattgaatgtggccttgtttaggttgtgtgcgtagtagactttctctatggatctgaattcactttcactgtatgggtaaaactattctctctgctcaggtgggcatcgcctgtttgctttgggaactcgtgtgcgaaccggtctcgaaatactgtaaccacagggaatgacgaatgctatttgctgtatttttctgaacattatttgtattctttggt

SEQ ID NO: 8789 - DNA, 407 bp, Triticum aestivum
  Clone ID: LIB104-053-Q1-E1-F1
ggcggaagcatgacagcaccctcttgatcaggtcactgtaaaccagggagccagggttgaagttcatcgcttcgtagctcgcgtagctgaagccctcctcgggagtaacgtggattgtggaggctgcagggccgcagacgccgttcatcgagtagccgcacgggtcgaagtcgaagtcgcagatctccatctcggggatgatagcagagatccccgagaccttggtcatctccttggccgaggagcagccgccgtcggcagagttcttgaagaacaccgcggccttcccggcgtccagcccagtcatgcacatctcgagcgtcaccatgggttgctcaggctcctcagtggcgtagtagacgtgccacatcttcttgggcctgaacgcatcacccatcacatatgca

SEQ ID NO: 8790 - DNA, 379 bp, Triticum aestivum
  Clone ID: LIB104-053-Q1-E1-F10
acgggcctaagttgcatcgggtaattccgcaacgggaaagggaggtaacgggagaaagcatgggatccagtacgtatggccagatcagtgagtccgaacgagggtgcaatctgtaccatcgattgatcgtgagtcagcggtgagttaatgctggtaacgtgatgcttcacgctatagggctcctgtggtcgcatgtgtcggcgtgtctatacgatgcatccttacataccccttgatcacacttgatagcgcatctatagtgtgtatcaattgatatcatgagtgcttgttctacaatgtccagagtgaaaaaaggctgacataacacaagatggtcaccttgaaggacatcaccctttagacaactcgcgggttacct

SEQ ID NO: 8791 - DNA, 439 bp, Triticum aestivum
  Clone ID: LIB104-053-Q1-E1-F6
tccgggccgacgggtacggcagcgagaattatgtgtttccatttactgttatgaccccatgaggtcatggcatcttgagcttgaggtatgcgtaatgcggcactgtattgaattttgcaaatattgtccgtccgagcagtgcatgatagccactacgaaacgggacgatgtcgaagattaactcttcgcttcagaagttgttcggtgatccgaagaccacttccagtgtgattgagcctgtgcaatgggcctctacacctgggatgacgcttttaaaggtggttttgctgggtttgatcctcgagggatcgatacccatttttcacactgtatgctgataaagcaggttcaggctgctgctgccgtccataaggactcgagtgaggtcaaatccgtcaatgatggggtctaaagacagtgcggcggatccgccatgacg

SEQ ID NO: 8792 - DNA, 427 bp, Triticum aestivum
  Clone ID: LIB104-053-Q1-E1-F8
aattcccgggccgacgggcgatgaacagaaatgaggcctccacagcttcaagcgcctcttctaagtctctgtttgccgtagcaatggattgttatgaccactgtctcgtttggtcggtcgttttaagatatttggttgtcttgtaatcggatatattatgcgctcgataacatctgggatgaactaaactgagcctaaataactggttgctgtcaatttgcttggtatcgtcttatagtgtggcaactgatgttgggggataatcacctcaactgaacgctgccctttataacaatgaatagtctggttttgtcgatgcacttttgttattgcattgccccactgaacaggcattgcaatgatgtgatattatgatatgcttgacacaaaacaaatcaattcaaataaaaaaaaaaagcggccgctc

SEQ ID NO: 8793 - DNA, 416 bp, Triticum aestivum
  Clone ID: LIB104-053-Q1-E1-G1
ggggctgaagtgatgggctgggccgattctgctgggccaccaggtgggtgggcctcaggtaagcgtcaggtaaggtttctctgctctgtcttttacttattgttttctatttttttctgcagctttgtggctttattaaaaatactaaatcaatcccaaaaatcatgcaactgctcatgaccactgttagaaatatattctacagtaaacatttcagtttgggattatttgagcatttagaatattttatagtatttaaatgcccaaatgcaaataagtaatgatttaaattcaaagtcccaaaaataaatccttttaaaatgttcattattttttgtttggatgaaaacccttgccaaaaatattaaacatctaaggagagcattttggagcaatgaatgagaattaaggttttt

SEQ ID NO: 8794 - DNA, 393 bp, Triticum aestivum
  Clone ID: LIB104-053-Q1-E1-G10
gacggggcgtctaactcaacattaagtagttgagacacgtgttgagcgataatttgctgaatcgtgcatggcatgctacgtcgttgtcgctggacgtgtagtttagagaaagaacccatttcatatatagaatagatagtgaaacaaactagtaggaaaaaaagaaatggcaaagaagcataccagtctaacaccagcgtcaggtatttcaccttggacgagcctatattcatacatgacccagtcggtccttgtacccttgggcgccttgccagcgtgaaacaccagggtcctcttcatcccaacagtgcgattttcatacaccacctgcctgtcctttccagtagccttccagtagccaccttcggttgaacggttagctctatgcccaac

SEQ ID NO: 8795 - DNA, 413 bp, Triticum aestivum
  Clone ID: LIB104-053-Q1-E1-G11
attcacgggtcgacgggtcatgtcaatggctaggaaacttaaccatctttgattcaacgagctagtcaagtagaggcatacttgtgacactttgtttgtctatgtattcacttttgtactaagtttccggttaatacacttctagcatgaataataaacataggccgcctccacctctctcccactaaggcccaataaggcccatacactccccggggggttccggtaacctcccggtactccggtaaatgcccgaacccacccgggaccattccgatgtccaaacatagccatccaatatatcgatctttatgtctcgaccatttcgagactcctcgccatgtccgtgatcacatccgggactctgaacaaccttcggtacatcaaaacacataaactcataataccgattg

SEQ ID NO: 8796 - DNA, 232 bp, Triticum aestivum
  Clone ID: LIB104-053-Q1-E1-G12
cttcggtgatggttcgcttcattatccggagcccattacgacagtcatgactttcatgcaggggtacgctacctgcatgcgtgcgcaagttggttaggctatgcatggcgtcagttacctggctaagttgttacgctacgtgcatgcatcgcatggacatgggtgcatgtggttgagatattctaggcggtgactgtccgtgtgtgtgcatggatatagtttgctagactcc

SEQ ID NO: 8797 - DNA, 422 bp, Triticum aestivum
  Clone ID: LIB104-053-Q1-E1-G4
tgcggtcatgttagtctcctcttcagagccagttagcagttgtggaacaggtggagctttactgagcatttgctcatggatctgtgtttgcaacagttctttgtgtcaaagaaacagaatggggcgtatttaagaagttcttcaaagtgtgttgggaattttacctcatcaattacactttggcgttctggggagccgaattttggtggtgtttcacgtgatttgatagcgagtgctcgtctatcttccttcttgtagtccagtgaacccaatgcgccaccaggatttgttggcatgaaagcaatcaatgctactagtgctgtgcgtactgcaacacgaatagtttggctcagatgtgtatacatcatatgaacaagaaaaaggaaaaggaaaagaagacacatataattaatataacacac

SEQ ID NO: 8798 - DNA, 430 bp, Triticum aestivum
  Clone ID: LIB104-053-Q1-E1-G6
acgggaacaccagctgcacacccgtataaccttgtaagtatctgtcctccggtacaacatcaaggtcgattcctcttatttgatcaaccattcgccgtgtcaaaaatgcagagggggatgcaaggagcacaaggcctgcacatccaagcaagtggtaacatggacttgtacatggaacatcccaagcgcaatcaaagctgcagtgagcctgtacaacgagctagcgtaagtccctgcatttcatttaattcgtactggcattcgtgtatgatttgtgtgcactggctgatccacgaatttaagttaccaggggcgaacatttaacttaaaaaatacgaaggcacttgcactctggaaatcaacataacttgagaaatgtgaagctacatgcaccttgagaactagctaatgatccaaagtaattcggatt

SEQ ID NO: 8799 - DNA, 429 bp, Triticum aestivum
  Clone ID: LIB104-053-Q1-E1-G8
cgggccgacgggaaaggcacccgcgggcaagaagcccaaggccgagaagcggctgccggcgggcaagacagcggccaaggagggcgaggcgaagacgaggggccggaagaagggcagcaaggccaagaagagcgtggagacgtacaagatctacatcttcaaggtgctgaagcaggtgcacccggacatcggcatctcctccaaggccatgtccatcatgaactccttcatcaacgacatcttcgagaagctcgccggggagtcggccaagctcgcccgctacaacaagaagccgaccattacctcccgcgagatccagacctccgtccgcctcgtcctccccggcgagctcgccaagcacgccgtctccgagggcaccaaggccgtcaccaagtttacctcctcttagatcgcgtcgcctgtatctag

SEQ ID NO: 8800 - DNA, 356 bp, Triticum aestivum
  unsure at all n locations
  Clone ID: LIB104-053-Q1-E1-H10
acgggcatcgaaaagaccctgttattgtgagaattcttaattcaagagttatagggagggacttatgtcaccacanacagaaactaaagcaggtgttggatttaaagctggtgttaaagattataaattgacttactacaccccagagtatgaaactaaggatactgatatcttggcagcattccgagtaagtcctcagcctggggttccgcccgaagaagcaggggctgcagtagctgccgaatcttctactggtacatggacaactgtttggactgatggacttaccagtcttgatcgttacaaaggacgatgctatcacatcgagcctgttgctggggaaaaacaccaatgga

SEQ ID NO: 8801 - DNA, 381 bp, Triticum aestivum
  Clone ID: LIB104-053-Q1-E1-H12
cgggcagcataattaatgaggttttaacaccacaaaaaccagtaaataggatggagaacaatcgtcgtccgttttgggacatttttggtatgacttctggaaggaaaattgtgccagcacaacaagctgtggatcaggatgcttctgctgccaaggtggatcaaatagacatggagtcaaatgacatccgccgcttcgaacagttgagacgtgagttgattgagttagaaaggagagtgcagaagagtacagatggtgctaaaaaagaggagttccaggaaacggaggttccagatgaaacaatgagcccttctgagtcagcaccccctctgtcagggcctcctggttcagtaatcaagaaagaaaatgttattacaaaat

SEQ ID NO: 8802 - DNA, 326 bp, Triticum aestivum
  Clone ID: LIB104-053-Q1-E1-H2
tacgtttcacagggttcatgccgagaagcggctgccgtcgggcaagacagcggccaaggagggcgaggcgaagacgaggggccggaagaagggcagcaaggccaagaagagcgtggagacgtacaagatctacatcttcaaggtgctgaagcaggtgcacccggacatcggcatctcctccaaggccatgtccatcatgaactccttcatcaacgacatcttcgagaagctcaccggggagtcagccaagctcgcccgctacaacaagaagccgataattacctcgcgcgagattcagacctccgtccgcctcgtcctccgcggcg

SEQ ID NO: 8803 - DNA, 410 bp, Triticum aestivum
  Clone ID: LIB104-053-Q1-E1-H3
aatataagactattattggagccagtgccatttctggattctgtgcggctgcttgcagtctgccctttgattacgtgaaaacacaaattcagaagatgcaacctgatgccactggcaagtacccatacactgggtctttggactgcgccatgcaaaccttgaagaccggtggcccatttaagttctactccggcttccctgtatattgtgtcaggatcgccccgcatgtcatgatgacgtggctcttcttgaatcaaatccagaagtaccagaagaagatcggcatataagatctccagttggagacaagagtaccaatccttgttcgacacatttaataactttccagcagctttgcactcccgtggttgtttttggtacacagagttttaagcaatttttaccgtagc

SEQ ID NO: 8804 - DNA, 410 bp, Triticum aestivum
  Clone ID: LIB104-053-Q1-E1-H4
ttaatcaccacatgatatgtgttttgcttggagcgtcatttttttttgctttctgtttgaataaaataccaagatctgaaattcttaaatgttagagagtcttcatatagttgcataattattcgactactcattgatcttcacttatatctttcggagtagtttgttgttgctctagtgcttcacttacatctttttagagcacggcggtggttttatcttacagaaatagatgaactatcatgtgtcacttatattattttgagagtcctaaacagcatggtaatttgctttggttatgaatttagtcctaatatgatgggcatccaagagggatataataaaaactttcatataaagtgcattgaatactatgagaagtttgatacttgataattgttttgagatat

SEQ ID NO: 8805 - DNA, 399 bp, Triticum aestivum
  Clone ID: LIB104-053-Q1-E1-H6
tgtaatcggctgggggccgaattggatatggcccccatcgccagtctccatgggggtttgctcccccatgtgtccagcagctgaggtttcaccctctggcgccgccctgacggcctcctgcatctctccctggcctgggatccttcgggacaacacctcggtgtcatccatggccctgggagaggaggccgccggaagggacccgctgtccatcaccttcgggtccagcgaattccccgaagatgaggatcgctcaaagtcggaacgagccggactacaagtgcatgattcaacatgttaaaactatgaagtaaaaaggctggatatatgaatgcgtcagggtctttgagtactcatgattcggccaggggcttatctcgggggcgccgctctgggctg

SEQ ID NO: 8806 - DNA, 284 bp, Triticum aestivum
  Clone ID: LIB104-053-Q1-E1-H8
ccgggccgacggggttaggaagaagtggggtggtggtgtcatgggctccaagtcgcaagcgaagaccaaggccagggaaaggcttatcgcaaaggaggctgcgcagcggatgaactaagtttagcattgttgaaccatatctattcctcatccttgagtagtgtgcaagcatactgtggcagtttggctccagttttgaaagtcatttttgtttgtctgaaacatcttggaaagaacagtgtaagaatgaagtatttctgtttaatgccagttagtatttttgt

SEQ ID NO: 8807 - DNA, 189 bp, Triticum aestivum
  Clone ID: LIB104-053-Q1-E1-H9
ccagcggtggcacgactggacggggcacgcttggtcccttcggcctccttgtgctcgctgatgccaggcgccacggtggtgatatggagcggaccggcgtctacttctacgtcgcgagaggcctcaacggcggcctgcgccacacacttctgtcatgacgagacacgctcatctcatgccaacgatatt

SEQ ID NO: 8808 - DNA, 390 bp, Triticum aestivum
  Clone ID: LIB104-054-Q1-E1-A11
ccaatataaataaagaatgagttcattacagtaccttgaagtggggtttggtttccttccgcaaacggaccttacaattttccggtaaattttggggtggtgaattttccaagtttggggtaaaaatccaatggacaatggaacaaggattggcaaaagccaaaccttggggatgcccatggcgccccaaaatgatcaaaggacaccaaaaacacaattcttggggagcccccggaaggcatcccctctttcgtcctcatcaaccggtaactttacttggagctaaattttaatttaccacaagatatgtgttttgcttggagcgtcacttcattttcttttgctttgcttgaggtttgaataaaatatcaagatctgaaattatcaaat

SEQ ID NO: 8809 - DNA, 408 bp, Triticum aestivum
  Clone ID: LIB104-054-Q1-E1-A12
tccggatatcaaaggtcgaccggacctcatgtcatgacatatcatctcatctcacgtgcacaacaaactttggattgttctggacatgtcttggttcattatttgaaaatttgattgctatggtgttgtttgaggctggtttgagcagaggaaaagttgttccttttttgatgatcatggtgatactgctgtcatgttgcttcttgtagtgagtagtatacacatggacctgataaaatggtccttgatatgatggaattagtagcatttgtgtgggtttacactgttgtgcctaaactactatggttgccaagccagcatccattgcatcaatcctcatgaattagtggacaatgtatagataaactctatggaacaataatgatagtgaatcagcacaatagttta

SEQ ID NO: 8810 - DNA, 414 bp, Triticum aestivum
  unsure at all n locations
  Clone ID: LIB104-054-Q1-E1-A3
gatctatccacctaggggcatgacatcatctcctcaaattcaaaggttccggaaggcggaaaaaatggtaaattcaacaaagggcctggaattttggaattttgggttcaacttgcaagtaaccaaggtactatcagtacggattgcagactgcggggaggctatatataaattttcattcgctctgcttttgaaattactcctcgatgttatgtgccaactgccaaccgtacgcctgaacgatgtttgaggcctctattagaaaactggaagttgtaactttgtgactggacaagtttgtcgtaattaggatacaaagttctttgttatgcaattctaccgttttttgttgcaaaaaaaaaaaaanaactaaaataaaaaataaaaaaaaaccaaaatatccaacacaaaaat

SEQ ID NO: 8811 - DNA, 243 bp, Triticum aestivum
  Clone ID: LIB104-054-Q1-E1-A4
ccacatcccaactgcaggccttcgtacactattaatcttcaaccagaggttatctcgtacgatcaatggaaagatcctaaggcagatacgacacgtggactttcgacatggatgaaaggtgcatttcatggaaacaaaagcgacatccaagattcattactccaaaatctgtattcaattctcagcacgtcgcctaagtgcgacatgctgcaactcacaggggacaaaaatgtccttggtgaa

SEQ ID NO: 8812 - DNA, 477 bp, Triticum aestivum
  Clone ID: LIB104-054-Q1-E1-A5
gggtcgaccggatctatccccctaggggcatgcgtagtagtactttgcttcaagggctaataaacttttgcaataagtatatgagttctttatgactaatgtgagtccatggattatacgcacttttacctttccatcattgctagcctcttcggtaccgtgcattgccctttctcacctcgagagttggtgcaaacttcgccagtgcatccaaaccccgtgatacgatatgctctatcacacataagcctcattatatcttcctcaaaacagccaccatacctacctatcatggcatttccatagccattccgagatatattgccatgcaacttccatcatcataatattcatgacttgagcattcattgtcatattgctttgcatgattgtaagatagctagcatgatgttttcatggcttgtccattttttgatgtcattgctacgctagatcattgcacatcccggtacaccg

SEQ ID NO: 8813 - DNA, 481 bp, Triticum aestivum
  unsure at all n locations
  Clone ID: LIB104-054-Q1-E1-A7
cgggtcgaccggttagctggaaaaaccctctgaagtttattgcagtaaacttgggtgaacactgatgatcaacacggattttactggcgccaaagagtttgtcttgggtgattaactaaggaaggactatgatcctggaggttttgtggcataatggagcacaaactaacatagttgctttgtagctcacattatgtgtccagaatcaagatttggatgatgcactcacatggagtaaccacttgaggtaaaacttggcaaggcttagtgacttggccagataaaggtgctataaaaatttcataccaattggttttaccaaaatggtacttccttcacaactatcttcactggccagaatcttgcaagaattctagaggagtattggctaggttaaattgtgccaaatttggtggagagaagttattttgtaggagaatactctagtaaattgtcaggcaaaatgaancaatataaaata

SEQ ID NO: 8814 - DNA, 368 bp, Triticum aestivum
  Clone ID: LIB104-054-Q1-E1-A8
cgggtcgaccgggggagagttgtacagccaaatcccaactgcaggccttcgtacactattaatcttcaaccagaggttatctcgtacgatcaatggaaagatcttaaggcagatacaaaaggtggactttcgacatggattaaaggtgcatttcatggaaacaaaagcgacatccaagattcattactccaaaatctgtattctattctcagcacgtcgcctatgtgggacaggctgcaactcagaggggacaaaaatgtccttggtgaattcatggaatttaaaagcaagaatgaagacattccaatcctgaaaaaagttaagaaattaaaagttaacccaattgtcaaccaaaaatcaactccttt

SEQ ID NO: 8815 - DNA, 481 bp, Triticum aestivum
  unsure at all n locations
  Clone ID: LIB104-054-Q1-E1-A9
tcggattccgggtcggccccctanggtttctagaatattgcggtatttatagagcaaagaggcggtccggggggcaccaagtgggcacaacccaccaaggcgcgcatgggcctcctagcgcaccctggtgggttgtgctcccctcggaggaccccgcgacgcgtcatcgtgacccattgggtgtcttctgctccaaacaaatcgcggtacagtttcgttgtacttggacgctgtttggtagtgatttcctgcgatgtaaaaaacatgcagaaagcagcaactggcacttggcactatgccaataggttagtaccaaataatgatacaaaatgattataaaacatgcaagattgataatataacagcatggaacaatcaaaaattatagaaaagttggagacgtatcagcatccccaagcttaactcctactcgtcctcgagtaggtaagtgataaaaacagaacttttgatgtggaatgat

SEQ ID NO: 8816 - DNA, 481 bp, Triticum aestivum
  Clone ID: LIB104-054-Q1-E1-B1
ccggtcaggaaatctcggccggtccggtgccgggactggagttcaggaactggtcgcggcacgccggccgtggctgctgcatccatctcgatctccggtgccgcctttgggccaggccgccggtggcctcgccatcgtatccccctccgacgttggtcatgggatgcagtcagcggtccagctgcaggaggaacaggatggccacatggtacacaaatgcatttatgtatgtgacacctacccaaaaaccaggttggcccaccttcggcccccagacggccccagggaattgacgtctagttgtcgctcaggctggtcacaatggacaagaacataagctagtaacttacacactttcctagactatattactacctccatagtgggtaggaacatctatgtagtgtcatgcaaagatgtatttattaggttatagactcattgtttcttggagtgtgtgatgttccggtaacttagctag

SEQ ID NO: 8817 - DNA, 260 bp, Triticum aestivum
  Clone ID: LIB104-054-Q1-E1-B10
gtaagtgtagaaatgactatttgcagcgtgcatatttttcacgctatacaatgtcgagaatagacattgttgcgtgtattattatacttaatacatggttcactagttatattagggtggttctgctaatgttattcttctcgaactcgtgatcagttttgactgataaaaatgtccagtggcttcgaggattcatcatattattttatcatatgatatgttttttttcctatttttacattcgacagactttgataatg

SEQ ID NO: 8818 - DNA, 448 bp, Triticum aestivum
  Clone ID: LIB104-054-Q1-E1-B11
gagccccctcctcagcccacgccgtcgtccaactccaactccaacgcggtctccttcgccaaccgcatgacgaactaccccttcgcggaaaacttgcaacctccggcgccgatattcgccgacaaggccgccgcgctcgcgtccctcttcgcgccgcctcctccaccgcctctcccggtgttcagcttctcggcggagcccaagatggaggaggcgatcgggtcactgctgctcccggggcaggaggcgtcgcaggagccagaggagcccacctgcacctccaccgtcgcggacatggcgccgttcatgtcgctggacgcggggatctccgagctcggcgacgcgtcgccggccgattactggaacggcgggagctgctggacggacgtccaggacccgtccgtctacctaccctagtttggcttagttcctcatcacgattgcctta

SEQ ID NO: 8819 - DNA, 436 bp, Triticum aestivum
  unsure at all n locations
  Clone ID: LIB104-054-Q1-E1-B3
cctgactaatatggacatcccgaccttcgatattgcatacctgcaacccacgattttctcgagctttcaagtactcccttcatcctaaattacttatcgcagaatggatataatttttttccgaaaatataagaaatgaatgtatataaaactaaaagtacataaaaaacgccacaaccctgaggagcaacgaatctacttttatcaaggattactactgactaactgcttcgttttgtataatatcgtcatgtttaccaggaaagaagggacgaaatttgcctgctcccctcgcgtgtgcccatccgtgctcccgcgtacgtggtttaatttgattgaaacaaaataaggcccggccccacctcattaaaatcagggggggagataattagattagaaaaaaaaaanaaaaactaaaaaaaaaaaaagcggccgc

SEQ ID NO: 8820 - DNA, 435 bp, Triticum aestivum
  unsure at all n locations
  Clone ID: LIB104-054-Q1-E1-B6
cggtcaggccattccgggtcgaccggaatggagcaaagattggagctgtacaatcgagttcctcccaatggattggtgctttatactggagttttactatccatagaacgcatggagttggccggcagcggcagagtatgggagcagtggtggcggcgtggcatatcagctctcctagagtgagctagttgcagtagaggctaaggaaatgcagtagtgaacaccaaagaaatagatacgaaacgtccgcccgcccgcgccaccgccgaatctggcagcaagcgcacccgtgcggccgagttgcacaacctctccgagaaggcggtgtcncgcttcnccgtcgttaaccacttttccctgagtttcgccccgcttttctactgttctcttctcgccctattttcccggctgctcattgcttgcttgcttgattgg

SEQ ID NO: 8821 - DNA, 456 bp, Triticum aestivum
  Clone ID: LIB104-054-Q1-E1-B7
gggaagaagaaggaggcggagggatggggcgcgggaagatcgagatcaagaggatcgagaaccagggcaaccgccaggtgaccttctccaagcgcaagaacgggatcctcaagaaggccaaggagatcagcgtgctctgcgacgccgaggtcggcgtcgtcgtcttctccagcgccggcaagctctacgacttctgctcccccaggacctcgctatcaagaatcttggagaagtaccagaccaactccgggaagatactgtgggatgagaaacacaagagcctcagtgcggagattgatcgaatcaagaaagagaatgataacatgcagatcgagctcagacacttgaaaggcgaagatatgaactcgctgcagcccaaagagctgatcatgattgaggaagcacttgataatgggctgacaagtctgcatgaaaaacagatggagcactatgaca

SEQ ID NO: 8822 - DNA, 237 bp, Triticum aestivum
  Clone ID: LIB104-054-Q1-E1-B8
acggtcaggctagtccgggtcgacgcggcaccgccggaggcattcatatagagtcataccttggtctaactatcaattggaaatcctggattggtaatctatataaattgtaagattcaccataataaaacaatggcccaatgtggagaagagattatggacaataagacttccacacatctcgagatggcatccgactttataaaaataaaagaggccaaagatgctcagcagctc

SEQ ID NO: 8823 - DNA, 482 bp, Triticum aestivum
  Clone ID: LIB104-054-Q1-E1-C1
tcggaaatcaagggtcgaccggatcgcgtttgctgtgagcaaactgagccggtttgtttccaaaccgggtgatgtacattggcatgctgttgagagaaaggtactatgaactatggacttcactataccggatacccgtcggtacttgaagggtatagtgatgcgaattggatctctgatgctgatgagatgaaggccacaactgggtatatgtttactcttggaggtggcgctgtttcctggaagtcttgcaagcaagcgatcttaacgagatcgacaatggaagcagaattaacggcattagacacatctggtgttgaagcgagatggcttcgagatcttttgatggacttgccattggttgataaaccggttccggctatccttatgaactgtgacaatcagactgtcatcaccaaggtgaagagttcaaaggacaacatgaaatccaccaaacacataagaatgagattaaaagctgt

SEQ ID NO: 8824 - DNA, 444 bp, Triticum aestivum
  Clone ID: LIB104-054-Q1-E1-C11
acagacagaaatacaccggacagggtgacgacttgatctaccactccaaggggcatgctctgaacccagggcaaagggactggacaaggtaccagccttgggaacaaaagaaagaagaggccacctgatctgtatgaatggtacctgataatcctcttctatgtttcgcatttggtttggtgtcgcggatctaaaaccgccagtcaccttggtttcatggactggacctgaataatgtactctatctgatactgaatacctgccactgaacaattttaatctctgtggatgtggcaattgagaaactggcgattcggtcgtcggtgtttgcattgaagagtttcttttttctactgatgtcaatggtgcgtggatgttgagatgctgaaaggagataatattgtttggtaaattccgtggtgttgcaacatgcccgtgttcttt

SEQ ID NO: 8825 - DNA, 349 bp, Triticum aestivum
  Clone ID: LIB104-054-Q1-E1-C12
ggcggtggggtcaatcccggaggcgcagctgaactacccggcgatactggtgcaactctccaagaagccgttcaaggcaaaccggacggtgacaaacgtagggccggcaaattcaatgtacactgctcacctggacgtgcccaattggctcaaggtgaaggtgcagccaaaggcgctggagttcacgtcggcgatggagaagaagacattcacggtgaccgtgagcagcaagggaggtgacgccgacgccaacgccgggcagctggccgaggggagcctacgctgggtgtctgaagatcacgtggtgcggagcccgatcatcgccgacgccagcgtttgtcccacatga

SEQ ID NO: 8826 - DNA, 414 bp, Triticum aestivum
  unsure at all n locations
  Clone ID: LIB104-054-Q1-E1-C3
catccttactgatggcgacgaaacagaggaactctcaatgaaagcaccaatgttggtgtcaaaaccggcggatctcaagtacggggtcncgaactgtgcgtctaagccagatggtaacaggaggcaagggacatgaagttttacccaggttcgggccctctcgatggaggtaaaaccctacgtcctgcttgattaatattgatgatatgggtagtacaagagtagatctaccatgagatcgangangctaaaccctagaagctagcctatggtatgattgttgatgtgtatgttgtcctacggactaaaaccctccggtttatatagacaccggatagggttagggttacatagagttggttacaatggtaggagatcttcatatccgtatcgccaagcttgccttccacgcca

SEQ ID NO: 8827 - DNA, 470 bp, Triticum aestivum
  Clone ID: LIB104-054-Q1-E1-C7
tacggtcaggtactccgggtcgacgcggagtccttggttgatttatagaattctcattgcacttcacttaaatcttttgagtgtggctttatagaatgcttcatgtgcttcacttatatcatttgaagttggattgcctgtttctctttacatagaaacctgccatttgtagaatgctcttttgcttcacttatatttgttaaagtgtgggcatatcttttgtagaaataattgaactctcttgcttcacttatatctttttagagagatgacaggaattggtcattcacatggttagtcataaaatcctacataaacttgtaaatcgctgaatatgatatgtttgattccttgcaatagttttgcgatataaaggaggtgatattagagtcatgctagtgggcggttgtggattgtagagacacttgtgttgaggtttgcaagtcccgtagcatgcacgtatggtaacc

SEQ ID NO: 8828 - DNA, 369 bp, Triticum aestivum
  unsure at all n locations
  Clone ID: LIB104-054-Q1-E1-C8
cggtcaggtatnccgggtcgaccgggatgacattgtaatccagcaggacttaagtccactttggtcggtacatctcaaaggcagggttaatggtgccgtcaaaacctgtggtgagattttcaatatgtttgatacgtatctcaacttctcaaaccctcttatcgccaagaaatttgaccgacgtgcatgtgggtgggcatatggcatgaacatgtttgatttgtctgagtggagaacgcagaatattactgctgtgtatcactactggcaagaacagaatgaacatagactgttatggaagttangaacactccctgctggcctggcgacattctggaacancacttccctctcgatcgctcatggcat

SEQ ID NO: 8829 - DNA, 449 bp, Triticum aestivum
  Clone ID: LIB104-054-Q1-E1-D10
tcggaaatccaaggtcgaccggcctggtatttgcagatatttgaactatttagtcgccataatattctcttgggctcgcctggaacctgcgtagaccaagtacaattttggtcttaagttgtagaagtgaagatgttaaatattttctaatgttcttaccaaaggaatgtgtaaataaatcatatatatatatatagcttgttcgcacgatagagcggacgacttaggtgcatagttgaaaatgtgcgtaaaattctatacaagcatacacatcttttacggtttgttatcgtgttaaatcatagcattcctttttatgatgattgtgcatgtaccttgggtatgtattctgcaaccttgacaaccggcctccactcttctgggggaggagctcgaacaagaatcaagaaggagccaaaggagtttacacaagagttaaagcatacaaa

SEQ ID NO: 8830 - DNA, 328 bp, Triticum aestivum
  Clone ID: LIB104-054-Q1-E1-D11
gtcggccggggatcggcggcaaacaacagcttcgaggccgaggtgaggacgcttggcaagattcggcacaagaacatcgtcaagctcctgtgctgctgcacgcacaatgactccaagatgctggtgtacgagtacatgcccaacggcagcctcggggacgtgctgcatagcaggaaggccggtctgctggattggccgacgcggtacaagattgcactggacgcagccgaggggctgtcctacctgcaccaggactgcgtcccggcgatcgtccacagggatgtcaagtccaacaacatcctcttggatgcagagttcagcgcttgcg

SEQ ID NO: 8831 - DNA, 413 bp, Triticum aestivum
  Clone ID: LIB104-054-Q1-E1-D12
tcggatatccagggtcggccggtcctccacggcgtagtccatttgccgcgacctcgccgccgtcagatccgacccctctagtactagtttagcgtagtatgtagtataactatgcttgtagttttttgatcatgtgatgaactatgtagtatgtgatgaactatatttgtgcaatttctcccgcgaaagtgttttttcaaattatgcaggtttagatacgggttctgttcggccgcgctagttttcgacccgcaaacgcgatcttcgtggaaccgcaaatgcgttttgcgggtcaaatttttgcagggtctgctagagttgctctaagcacacacatttttgcttccttgatagatattctggtttttcgcaaatacctatttcccaacctaatcaagaaaagaccactttta

SEQ ID NO: 8832 - DNA, 184 bp, Triticum aestivum
  Clone ID: LIB104-054-Q1-E1-D2
acatggcaagtacaacttcgactgcttcaaccacagaaaggcaatgctgatccgccggttccgttgccaagccaacgcaaggtaaccaacctaaaagggaaacaaacaaaggatcctgaagggcctcaaccaaggcaacttccttgccctgatccttgcgcccctggggttcccaacggaaaaa

SEQ ID NO: 8833 - DNA, 341 bp, Triticum aestivum
  Clone ID: LIB104-054-Q1-E1-D3
ccctgtcctgctaaacccaagctctaatgtggttgacttggaagtatgccattctttcactgtgaggatcttcttttagtctgtatgcaccccttgcccactaatgacatgacccaggtattctatctgtggttgagcaaatgaacatttattcaacttcacatatagttgattctgcttcagaaggtcaaatacttgctgcaaatgggtgacatgatcttgcaaggatttgctgtagattaagatgtcatcaacataccctcgttgtaacttccttcttcatttaagccacaattttgtccacagcattctggacggttggtggtgcacttgtgagccca

SEQ ID NO: 8834 - DNA, 482 bp, Triticum aestivum
  Clone ID: LIB104-054-Q1-E1-D5
acggtcaggcacgtccgggtcgaccggaatcccatgagcatgaggaaaggaaagctttgtgctgcattggtgttttaagtctttgagcagtcaaatgagctaagctcctgtgaatgaaacgcctgtcctgctaagcccaaactctaatgtgcttgacttggaagtaggccactctttcactgtgaggatcttcttttagtctgtagccaccccttgcccactaatgacatgacccaggtattctatctgtggttgagcaaatgaacatttattcaacttcacatatagttgattctgcttcagaaggtcaaatacttgctgcaaatgggtgacatgatcttgcaaggatttgctgtagattaagatgtcatcaacaaaaacaagtacacaaaccctagtcagctcagccagaattgtgttcatagcactctggagggtgggtggtgcatttgtgagcccaaatatcctaaaattcatagtga

SEQ ID NO: 8835 - DNA, 488 bp, Triticum aestivum
  Clone ID: LIB104-054-Q1-E1-D7
cggtcaggtataccgggtcgaccagcaccatccaagacagtgttcatgccgacccagtacataccgttaatgtagttgagactgacggggattggatcgcagtcaaggggtttgatgctcgccaccctacgatcgttatgctgcgtgacatgccatttctgaagatcaggcaagcatcagcaagcaaggagctggcttaaaaagcttcggcctgagggctttgagtaaacggtacagccccgacaagcacgcggcgagcggcatggtactgagattgtccacacgtgaaacaatgagcttgattacctctgtggggagcgaattccaaccactctttcggcccacgctgctcggttctgccattgttagtgcttgggtttcagacgaggggggaggcgccttagcggggatggaagattggacgagattatgtgcgtacaaagatggagaagcgaatatgtgctgcaggaagtggacaagtgatgatg

SEQ ID NO: 8836 - DNA, 418 bp, Triticum aestivum
  Clone ID: LIB104-054-Q1-E1-D9
ggtcgaccgggcccgagcacaaatgacattctggacgcgcacattgcatgcaaaagcggtggttaccgcgtgcaggggtgcacacagtggcacacggccggccaaacaatgtctgggggcttgtccttcctggggaggttgcatctgatgtggtagattggttaaaagtgacacggttaaatggcagttaacacctgaagtttattgcagtaaactttgaggagcactggcgatccacaggagagggattggaaacaatggagttgtctggtagatttagggttagaaggactttcatcctggtaattttgagaagaattggaccactaattaatatagttgctttacaactaagtaatccggtccagaatgaagatcatgatgatgctctcaaatggagaagccacttgagctaaac

SEQ ID NO: 8837 - DNA, 478 bp, Triticum aestivum
  Clone ID: LIB104-054-Q1-E1-E1
ggtcgacctccgcggacgaggtgcaccgcatgatggcagaaatcgacaccgacggtaacggcttcatcgacttcagcgagttcatctccttctgcaacgccaacccggggctcatgaaggacgtcgccaaggtcttctgaatcagttcatttcacctcagccgtccgttccaggagccgatccatctacgtacggcttcgtatatcaatttcatgcaactacctactccggtcccgatccagcctcagcttcacctgaggccggccctaaatttgtttgatcgattcttttgctactagtagtaactagtgatgatcactgttgcatcatttatttatttattttatatatcatcacaagtttcctgtgattcttttctttctatacctttttgtcgatcgtcggctccagctcgatcgaacgatccatgctgctaattgtttgtgtacgggtgattaagtaacttgtgcacttgtgc

SEQ ID NO: 8838 - DNA, 259 bp, Triticum aestivum
  Clone ID: LIB104-054-Q1-E1-E10
cttacccccggtatgtagttcgggcaagccctgaaccggaacgggcgttggctgcaaaattttttgggcgcaaaattaacaaaaggtggttttaattcctaagttccttaagttttccaaccttgaccgatgtttgggcccaaaatgtccggaattttaagcctttttgtgttaccttttcctgccgtggttaaaatttttttccctctaggtaatgacatgagcaatttttaagaaaaatttatacccataccaattt

SEQ ID NO: 8839 - DNA, 405 bp, Triticum aestivum
  Clone ID: LIB104-054-Q1-E1-E12
gtcgaccgggcaggatgaggaagggtggtcggccgaggcgaatgaagacgaggcggcgtcgtccaacgagaaggacatcaaggagatcaacgtggaggatgacggtattgtcgccatcgcggatgcctccgtgggcgtattcaccaaggaggatgacattatcatctcggccgatgctccggcgatagagaaggaccaaatcgacacgttcgtgcctgctccggcagccaaggccaacgaggatgccggtgccaccttcctggctgccccggtggccggtgatgatggcagtgcctccttcgttgctgcgccggcggccaaggaggacgaacttgtatccatctcgtctgctccgttggcgggggagattgagggtatcaccatggcggctgctccggtcgctga

SEQ ID NO: 8840 - DNA, 353 bp, Triticum aestivum
  Clone ID: LIB104-054-Q1-E1-E2
cccaattatcccccaaaccttgattaaggttccccaaaataaggcccaaaaaatggtgccaaaatcccaatcccgccagaatggctaaggggttaatcctggggccggaatgcaaaaagggaaaagccaagaccaatggttcttggaacaatccaatgaccaaaggaacaaagcctcaaggtgtctaaaaaataattccaaaattggttaaatttgaagcctaaaccaaggaatttaacgggcccaaccttggggaaaattttgaagaaaatgtaaaaggcaattccccaaccttcgaatctcaatccacaaaaccttgacaatgaaaacccaacccagtttccaaaaaacaa

SEQ ID NO: 8841 - DNA, 487 bp, Triticum aestivum
  Clone ID: LIB104-054-Q1-E1-E4
gtcggaaatcagggtcgaccgggatcagcgcctcaacgtcggaggagaacatgcgctacttcaatgtcatggcccttggccccgcgcagtcgccctacgaatgtggagtcgtcaagcttgaacttttcttacccgaggaatatccgatggctgctcctaaagttaggtttctcacaaaaatataccatcccatcaatgacaagcttggtacaatatgcctcgacatcctaaaggacaagtggagtccagctcttcagatacgcactgttcttcttagcattcaggcactgctgagcgccccaaacccagatgattccctctcagaaaacgtcgcaaaacactggaaatccaatgaagctgaaactgttgagacagcgaaggaatggactcgtatctatgccagtggcgcatgacaagctaacgctgtcatggatgtaataacaccgtgtcatagttgggcctaatctaaaaccatttccttgataaa

SEQ ID NO: 8842 - DNA, 447 bp, Triticum aestivum
  Clone ID: LIB104-054-Q1-E1-E5
cggtcaggaataccgggtcgaccgggagttcattacaatacccaagtggtgatttattttcttgtactaacgagcttacgagttttctattaagttttgtgttgtgaagttttcaagttttgggtaaagattcgatggactatggaataaggagtggcgagagcctaagcttggggatgcccaaggaaccccaaggtaatattcaaggatgaccaagagcctaagcttggggatgccccggatggcatcccctctttcgtcttcgttcatcggtaactttacttggagctatatttttattcaccacatgatatgtgttttgcttggagcgtcattttattttgttttgttttgcttgctgtttgaataaagtatcaagatctgaaattattaaatgggagagtcttcacatagttgcataattattcgactactcatcgatcttca

SEQ ID NO: 8843 - DNA, 321 bp, Triticum aestivum
  Clone ID: LIB104-054-Q1-E1-E6
gggtcgaccgggtatgtcgtgaaaactacatatttctgctgaagaaactacataatagttttactgatcgaggaggaaattacttggcttcaatattggtaatggtagggagagaaagaatatgccattctctctagctggaaaggacactataccatactggatgttataaaaaaatttggtcatgcccccggaaacattgaccacctcaacgttgactctatttccgttacaatcaatcaataactggtataataccatgacccgtggcctgcttcttggcatatttgtggttgttcaaacctcaacaataaaggtttg

SEQ ID NO: 8844 - DNA, 483 bp, Triticum aestivum
  Clone ID: LIB104-054-Q1-E1-E7
cggtcaggtactccgggtcgacgcgggtatactttcattgtcaacataacaaccaagagatggcgatatcttccatgctacacacattataggcggttcccaaacagaatggtaaagtttatactccccctccaccaacaagcatcaatccatggcttactcgaaacaacgagtgcctccaacaagcaacagtcccagggggagttttgtttgcaattattttgatttagtttgcataaagcatgggactgcgcatcccggtgaccagtcattttctcatgagtgaggagtggagtccactcctcttgagaataacccgcctaacatggaagataagggcagccctagttgatacatgagctattcgagcatacaaaacagaatgtttatttgaaggtttagagtttggcacatgcaaattttacttggaacggcaggtagataccgcatataggaaggtatagtggactcatatggaataac

SEQ ID NO: 8845 - DNA, 480 bp, Triticum aestivum
  unsure at all n locations
  Clone ID: LIB104-054-Q1-E1-E8
acggtcaggaanaccgggtcgaccgggtcgcagctcgaggcccgcgccgtcggcctcaaggtcgtctgccccatctgcaagtctcaactggccaacgagaagcagttgattgatcactatggatcaaagcatcccaaggagaaacctccaggtcgatcaaatgcagagtgactgatgcgaggcggaagcatgagctatactttgactgtttctgagggtttttcaatctgctccacactcggacgacttgagcctcagcgttaccctatgtaatgcatgcaattccccttgttccaagcaagaaccttgaagaacacagacttgccttaaatgaataacctggccaactggccacaaaccttcaaactggaagtggtacaatccttggataagagaatgctaaactttcccaataaggcaatctcctggtgcgtgaattgcggtctaaaaagctcaaaaatgaatgtgtttttcgcttac

SEQ ID NO: 8846 - DNA, 464 bp, Triticum aestivum
  Clone ID: LIB104-054-Q1-E1-F10
gccgtgagtaatagtgcagagaattcaccagaaaaataattcaattaaattcttaccagaattagaatgcccccaagaattttaagttaacaaaatggggaaaaaaaaacattacaaccgtccggtgtacggtcacaaagcacaacagccaaagtctgctcacttgcgtactgacatgacatgttggatccatccaaccaagtgatatggcgttatctaccgtgctggctagctagtgacccactgaccgctgaagtactgaacccatatacaccacgatagtattctggtcccatatgctcctgcagtccctacgtcgcgtggcttctagtatttcacgatgcatgataaatacttcctccatcctaaaattattgtcttagatttatctagatacagatgtacctaatactaaaatgtaatttgatacatccgtatttaaacaaatctaagacagaaatttt

SEQ ID NO: 8847 - DNA, 179 bp, Triticum aestivum
  Clone ID: LIB104-054-Q1-E1-F12
gtcggccgggacgcgctcactaagtacaaggcgaggaggcggttgcaaacccggctccttaacaaggtccccaacttcattggcaattgcccggaatggcaacaccatggtaattgaacccttctggcaaaacaaccggttacccaatccaatggccggaccctccggcttttcataaa

SEQ ID NO: 8848 - DNA, 482 bp, Triticum aestivum
  unsure at all n locations
  Clone ID: LIB104-054-Q1-E1-F5
ggtcaggtatnccgggtcgacgcggagcttaatcttccttctgctaatgaattgattagttctcagtcaaacaatgaggcaaatgttagtgcgcgcacacatcaatttcctaactaaaatcagaaggctgtgagccatttgatttattttaattgcatgctttttccagggaaatctggaaagcacacaggaagtgcaggtgaacccaacgagcttatctcaatacagggacatccagagaaagattgttgagtttatcagaaagagataccatattctggaaaaatgcttggacattgaatatgccgtgataaaaacaaatactcctgttcctgatgatcttactgaacaaaatgttcctatgggacatagcccagctgttccagatatcagtgaagtgttgagagaacttccccctcttgtaccaatttctgccaaagaagtggcttctgatggctcaactgaccangcacacctttccc

SEQ ID NO: 8849 - DNA, 366 bp, Triticum aestivum
  Clone ID: LIB104-054-Q1-E1-F6
cgggtcgaccggggatgaaagataatggccattgatgtctccattaccatcatatggatatggaagagagcgcaagggacctcgatatgggagcctcatacatggtcaagacctgaaggatgtgattataaccggtcataatggcactataaatgggcaaggccaaagttggtggatcaaatttcgcaagaaactcctcaatcacaccaggggtcctcttgttcagctcatgcggtcaagtaacattactatttctaacatcacattacgtgattctcccttctggacacttcatctatatgactgcaaggatgtcaaagtctcgggaactactattctggctccaattgctggggctccaaacac

SEQ ID NO: 8850 - DNA, 429 bp, Triticum aestivum
  Clone ID: LIB104-054-Q1-E1-F7
cggtcaggtataccgggtcgaccggggcggtacgaagggtcagaattttcagaagatacatttattgctaaagttaaaatggaaatagtcgtgtgcaaggagcaggttgagccagtaattgacaaaataattgagaaggccagaactggagaaattggtgatgggaagatattcttgatacccgtcgcggatgttgtaagggtacgcaccggcgaacgcggagtgcatgcggagaggatgatcggcggtctgtcagacaaactgcctccggtgatcacaatctcatgagtagagcttgactgctcttgctgcctgtaactgtaagcgcatccctcaggctggttgcttgtggccgtgtgtgtcttgacctttggggaataatgtgtatgtaactttgcgtgttggcacgaataaattggcaccagcatc

SEQ ID NO: 8851 - DNA, 289 bp, Triticum aestivum
  Clone ID: LIB104-054-Q1-E1-F8
tcgacggggaaatcgtcagcttaggcttggacactgtaaaagggaacatcatgctgcgcaaaatctattttagggaaagcccgatgtgttgacatatatcatagagctcactatctttgtgtgttttccccatcattcagttgcctcgtggtgactgacgacgtagctgcataaatatctaaaagccgaggtagcagtgggtctctctcactgatcaaatttgaggcgttgagcatggaaacatctgtgttatgttcttccttgggttaattaacctggttttcctccg

SEQ ID NO: 8852 - DNA, 425 bp, Triticum aestivum
  Clone ID: LIB104-054-Q1-E1-F9
gtcgaccgggagagtgaggacaaccggatgatgaccacgggcctgcacaccgtccgcgacatcttctgcgtcgcctgcggagccatcctcggctggaaatacgtgtctgcatttgacaaggatcagaggtataaggagggcaagttcatcctggagaggtgcaagatccattcgggcggaggcggccctcccgaccgcatccagctgtgggctgagcatgacgctcgcataagttccagcgaggatgacgaccagggcgccgtgtgaccttgcaagacaatgcaagatcagttcattaggcaggcagacatgacatgactgtaaatattagtgttaatcagcgtcgttccgttccctggcactgcaaatcatgtagctgctcgctagatgaagaaccatgaatgcttaactatctatgcatatgc

SEQ ID NO: 8853 - DNA, 396 bp, Triticum aestivum
  Clone ID: LIB104-054-Q1-E1-G1
gtcgaggcggccttaccgcaaggggctccgtcacaacctatacttaccgcgtggacacggacggtcgcacacacttaaactcgattgggtggaagagattcctcgatggcaagaatcttcgtgttggacaggtcatcctaattactatcaggaacacccaccgcccaggcttgaggatgatgatcgtatttgatatcatctagaactatatatgtgtgtgtggctatatcatctagaactacatatgatgatcgtcgtcgatatcatctagaactacatatgatgatcgccgtcgatatgaccttgtactgcttgaggatgcatgttgactatacatgaaattgttatctagtactcccttcgttccaaattaatcgtcgtgggttggactaaaac

SEQ ID NO: 8854 - DNA, 423 bp, Triticum aestivum
  Clone ID: LIB104-054-Q1-E1-G10
ttatagaaaaaatagatctctcaggcttaacttaaataatttcaagagcctaaaaacaagggaaattggcttaaaacccaagaaggctgggaatacaagattaaaaataaaactttctaatgagtgtgttgaatactatgataagtttgatacttgataattgttttgagatataaagatggtgatattaaagtcatgctagttgagtagttgtgaatttgagaaatacttgtgttgaagcttgtgattcccgtagcatgcacgtatggtgaaccattatgtgatgaagtcggagcatgatttatttattgattgtcttccttatgagtggcggtcggggacgagcgatggtcctttcctaacaatctatccccctaggagcatgcgcgtaatactttgctttgataacctggaaaattttgc

SEQ ID NO: 8855 - DNA, 385 bp, Triticum aestivum
  Clone ID: LIB104-054-Q1-E1-G12
tacggctgagagaagatggcctgcatcaggggtcatctttgaccccttatctttttgcattgattacggttgaggtcacataggttatacaagaatatatcacatggtgtatgctctttgcggatgatttggtgctacttgacgatagtcggacggggtaaataggaagttagagttatggagacaaaccttggagtcgaaagggtttaggcttagtagaactaaaaccgagtacatgatgtgcggttttagtactactacgtgtgaggaggaggttatccttgatggccaagtggtacctcagaaggacacctttcggtatttgaggtcaatgctgcacgaggatgggggtattgatgaagatgtgaaccatcaaatcaaatcc

SEQ ID NO: 8856 - DNA, 285 bp, Triticum aestivum
  unsure at all n locations
  Clone ID: LIB104-054-Q1-E1-G2
ctgcaagatggaccatggttgtatccggacaattcaatttgtgttaaaacacacaaggtggcggcctaaataacctgacatattgccaggaatattggttaaattaggaaatggaagtgatttcagcgacaacaacatggaattttggtaatgatggtggacaattcctgggcaatggaaaacgcgacgcagggtcangggcttgtgcccttcggtgggaaaacgagtaacatgttgttcgggctggagttcgtgatggccaatggttctctacaatggggactg

SEQ ID NO: 8857 - DNA, 289 bp, Triticum aestivum
  Clone ID: LIB104-054-Q1-E1-G3
gtcggccgggcaaaaaaatagtatcaatgtgcttcatggccaagtgacggttggcatactcgtaatgcaagaatgtgccggtggtcctccggttggaactcctccaaatttgaaccgggcctccgggtcctcctcaagggagttgcgtccaatgacaaaaatcccctggtgctattaaatatccgttcctggggaaatctctctatccctctcccggtacattgtgtgcccttgggtttcttaaagctgatgataaagtctttcctcctcagacaaaatgaactgtacc

SEQ ID NO: 8858 - DNA, 489 bp, Triticum aestivum
  unsure at all n locations
  Clone ID: LIB104-054-Q1-E1-G5
ccggtcaggccattccgggtcgaccggctagcggtggcgatagggttcgtgcgagagtggaagaagggataatgactatggtgaggcgtgtatttatagggacagggatggtacagcgttattacacaggtgcccctggtgattcacatctgaaggacacctggccatcatgcaacatataggaggttgttccacgttcccacgcacgcctggattgtcgggtggtcgttcccacttcttcgggtttcaggtgaaggaattagcattgaaagcggacttaatgtttgtctctgtatcttctgctgacaaggacgcagagaagacattcaacagtttcaagagaatgcatatgatttggagagatagagtttgagatagaaagcatagagaggttanggtccgatcacattcacttagttcanaagattcaacangaagacatagctataagtgaatgctgtaaaggacagaacactagtatatatatat

SEQ ID NO: 8859 - DNA, 452 bp, Triticum aestivum
  Clone ID: LIB104-054-Q1-E1-G6
cgggtcgaccgattctacgacccaatgctgtcgttcatcgacgtggccgtcaacgaaggcttcatcacccaggaggcgaggcagatcatcatctcggccccaacagccaaggagctagtgatgaagctggaggagtacgtccccgagtatgaggtcggcctggtctgggatgaccagaaccagatgccaagcaacagcctggtcccagagccgctggagacacccgcgatcacttcatcctaatcgatgtgcctcgcctacatctcagttagggttctaacaacagtgtcgagatagcggcgccacatatatttattctctcctagataagtcctagccaactgaagggcgacgagggggcacattatagcatgtgtgcttgttttggtagcgtcgatcgaccgatctcttgtgtcaccgctgatgattgttttgggtggcatgattatatt

SEQ ID NO: 8860 - DNA, 474 bp, Triticum aestivum
  Clone ID: LIB104-054-Q1-E1-G7
cggtcaggttttccgggtcgaccggctagtgcttcacatatatctttttataagcacggtggtggttttattttatagaaattattgatctctcatgcttcacttatatcattttgagagtcttttagaacatcatggtaatttgctttggctataaaattagccctaatatgataggcatccaagatgggtataataaaaaatttcatataaagtgcatttaatactatgagaagtttgatacttgatgattgttttgagatatgaagatggtaatattagagtcatgctagttgagtagttgtgaatttgagagatacttgtgttaaaatttgtgattcccgtagcatgcacgtatggcgaaccgttatgttattaagttggagcatgaattaattaatgattggcttccttatgagtggctgtccgggaacagcgatggtatttctaccaatctatcctcctaggagcatg

SEQ ID NO: 8861 - DNA, 281 bp, Triticum aestivum
  Clone ID: LIB104-054-Q1-E1-G8
ccgcaagaaagcaacgagcgcgctttcctatttggggtcaagagtggcgctgatggtgaatgtaccaccagtgccatcctccttggcggacaccttcttagtcccaggtggagctgccattgccttcttacacttgccggtggagctcgatggtgcgtcctcgacggtagcgcaacactccaaagaggtgcacttgccggagtaggcatcagagctcttgccggacttggtcttcttcgtccctccgggagcttcaacggcaagtgtcttgcgctctgctg

SEQ ID NO: 8862 - DNA, 333 bp, Triticum aestivum
  Clone ID: LIB104-054-Q1-E1-G9
gtcggccgggagcgcgaagctaaagcggagctccgccggcgagcagaagtgggggctgttcatcgcgaccaagtgatctggccgctgagcagcgacgccatggacgcgatgattcgggagcagagcagcttctgttaagaaataaataaagaggatcggtgctcgacaatgttgtggccgtgtgttgggtgtgattgtttgtttgttgcagtggctgcattcactggctgggcaccaggatctataagataatgtgtacgtacgtacgtactgtattcctgaacttgtactgtgacgagcgagactcgctttgtaacgtgctattctgttgct

SEQ ID NO: 8863 - DNA, 384 bp, Triticum aestivum
  Clone ID: LIB104-054-Q1-E1-H1
actagagcctgcctcctgttggtttcccatcgcatgctgccgcaactcctatgatctgcccgagtggctttatctgttaaccatcggtttttgcatttgggtagtgatgttccctaatatactggtatgtggtatgggtattgtaagttttttcatataaagtgccttgaatactatgcaaactttgagacttgatgattgttttgagatatgaagatggtaatattagagtcatgctaattgtctaattgtgaatttgatagatacttgtgtcaaagtttgtgattcccgtagcatgcacgtatggcgaaccgttatgtgatgaagttggagcatgatttatttattgattgtcctccttatgagtggctgtcggggaccacc

SEQ ID NO: 8864 - DNA, 249 bp, Triticum aestivum
  Clone ID: LIB104-054-Q1-E1-H10
gggtaaataagaaattagagttatggctagatacgtcggcctgtgaattccgattgcccaaaccggaggcataggtaggtcgataatcatgccttacgatcgcacttgtccaaaacttacggtttgtcacaaaagtacccccaccaatttgaactaccgggcctttcggctcaggtttataccggggatttcccctgttgggattttgacacctgccggacttttcgcgcgcgttgtaatttctggata

SEQ ID NO: 8865 - DNA, 370 bp, Triticum aestivum
  unsure at all n locations
  Clone ID: LIB104-054-Q1-E1-H11
acagtggttttgaactgctcattgatgccaaattttgtgatgatatatgggtgtgtgcctggggcatgctaaaaagtgcgcagattgtgcttggagttaccaaagctggcgccgctgctatatctggatagcaatgaagtgggtgcaacagangagaaggagattcttgagctttggagggtgctgaaggatgagctgtgtcttccgctgatgatatctttgtgccaactcaacgggttgcgcttgccgccgtgcttgatggcattgccaggtgatctgaaggctaaagtcttggagtttgttcctggtgttgatcttgcaaaggttcagtgcgcatgcaaggaattgcacgatcttgcaacagatgata

SEQ ID NO: 8866 - DNA, 394 bp, Triticum aestivum
  unsure at all n locations
  Clone ID: LIB104-054-Q1-E1-H12
cggaggaaaagcaaanaccgaaaacggcaagggaccccggggcttcccgcaacccccaatggcgggaaggaaaatccgcctcccctaagaagcaaccccatgcccaccgaaaggaccggggatggggttactaacaaccttcagctatgcttacaaaacaaactttgggggctcccaaggccagttcaccaagctaacaaccggcggcaacttgaaccaaaatgccccattacccaatgggaaactaaacatggcaaaggaaacacctccattaaaattataaaaaccaaagatgacaccacctaaataaatttgggtttttatgccaccctaagggatttaaaaaaacgcttgttggaagccaaccccattttatttttgtcctttgcttttt

SEQ ID NO: 8867 - DNA, 245 bp, Triticum aestivum
  Clone ID: LIB104-054-Q1-E1-H2
acggtcatgaaaacacgggtcggcacgatcaagaccaaccaggcgcgcccatggaaggagtactccaggaccatctacatccagaacgagatcggcgccttcatcgaccccaagggctggctcgagtggaacggcgacttcgccctcgagaccctcttctacgccgaggtggagaacaccgggcccggcgccgacatgagccagcgcgccaagtggggcggcatcaagactgtcacctacgccga

SEQ ID NO: 8868 - DNA, 77 bp, Triticum aestivum
  Clone ID: LIB104-054-Q1-E1-H4
gacccacgacttctttgtcctttcccaattctacacaagtttatttgactaggttgctctcgaggaagtccttaaaa

SEQ ID NO: 8869 - DNA, 406 bp, Triticum aestivum
  Clone ID: LIB104-054-Q1-E1-H6
cgccccataggaaggagtggcgacgccggggctgctaaagcactggaccacggcgtggagatggagacagaggttgtcgtcaccgccggcgagttatcgttgcaccctgacgtcgtcgacggtgtcgagcttccacagccggaggcagagttccacaccgactccgacgaccactccggcgatgactccgacgaccactccggcgacgactccgacgaccactccggcgacgactctgatgaccactccggcgacgactccgacgacgacggacagctggttagtcatctatacccatttatgtgtcaaatagatcatagggtttctctggttaatcctgcctccccctttttggaatagaaatcctatggttatgttctcccaatccatgaaatctgagtaagtt

SEQ ID NO: 8870 - DNA, 396 bp, Triticum aestivum
  unsure at all n locations
  Clone ID: LIB104-054-Q1-E1-H8
cctatccgacccaggacttctttgtcgttacccaagtctatagtaacgaatttgactaggttgctctcgaggaagtccttaaaatctaggcattcaacgttggcatggcatatgtggtagaccaagcataagtcatgcacgcaaacctggatcacggcgggcttcttcctctcttcgtcctttagatccttctctcgtcccaggactgtggtgtactcaacatctagcccagcgacncgctcatcatctgagtcttcgaacatgcttctgaagcgagaaaggcatcctttcacaatcccggaagaacgggtgtagatgacgtcgaactcatcgccggtgatggttctaaccttgtactcaccacggatcgtggagatttgggacgccatggatttg

SEQ ID NO: 8871 - DNA, 469 bp, Triticum aestivum
  unsure at all n locations
  Clone ID: LIB104-054-Q1-E1-H9
tccggcaatcaagggtcggccggggagggtggggtatcgcagctggagcagagaggttatggcggcctgggatttcgaatggcgaaaaggaggcgatgggagggggtgaagcatgacttaggaacgcacttgtccaaaacgtagggtgtgttacaaaagtacccccaccaatttgaactagcggccctttcggctcagggttataagggggatttcgcgtgttgggatttggaagctggagggagttttcgcgcgcgttgtaatttcgggatagcaaggcgcgggttgtgaaggcgccagttttgggagcacgatatttgaattttcgggatataacaagacgcgggttgaattttagggacaagcctaacgtgtagcaatattgtacttgtacgtaccaaatcaattcgcacttccctcaaccaaaaagaaaacgacaaaaataaaactattcacaccacacanagag

SEQ ID NO: 8872 - DNA, 462 bp, Triticum aestivum
  Clone ID: LIB104-055-Q1-E1-A10
ggtcaggaaggccgggtcgaccgggacccgcactgaaaaacggtctaccaatagacatgggtggaacatacgactgagctggggaaggcaccacataggatggcctcggtgtatatccggaaggaagagcggagtttggaacccaaatccggcgcttctgggaactagagccagaggaagatcccaatatacgggtgtgcttacgagactcctcgtaagtgagctgagctgtctctgcattgatggccttgttcacaagggcttggaatgtatcacaatgatgcaggtggaggtcacggcgcaacttgggggttagaaccctttggaatctagcctgcttcttggcgtccatggacacttcttctgtggcataacgggcgaggttctcgaactctctgctgtaagcatcaacagccatcttattctgggtgagactacagaactcttctctcttgcgatcga

SEQ ID NO: 8873 - DNA, 465 bp, Triticum aestivum
  Clone ID: LIB104-055-Q1-E1-A11
gggtcggcccctcgaccaatgacactccatcccaaccccaccaatcttcaccgctgcttgacgacatggagctgaacaccgctgcaaccatggtggcgccccctctgaccaagggattgcgacgccagcaaagcaaaggaagatccgcaacaaaactctgcaaggttaattcactgatctgtacttcaaacttgattgttgaattgtactaaattccatacccggtcttccggtggcctccctgcaaaaaaattgagatatctcatatattggcaaagctaatgcctgagagggagctaccaaacaagcatgctttatatttgggacgtgcaggctggaaggatcattggtaattgatcctatcaaaggaaggtgcgatctccagcctgaaggaatggctggttgattcagctataggaagcaatcctgttctgcaattgattgctggaatcgtatttatgcaag

SEQ ID NO: 8874 - DNA, 482 bp, Triticum aestivum
  Clone ID: LIB104-055-Q1-E1-A12
cggtcaggccattccgggtcgaccgggtaaaacgcgatgaatccttctctctgatttttttctccccgaacacgaatatatggagttgcagttgaggtcggtggagcgtcagggggcccacgaggcaggggggcgcgcccaggggggcaagcgcgcccccaccctcatggacaggtggaggcccccctagcgtggattcttcttccagtatttttaatattttccaaaaataagttccgtggagtttcaggtcattccgataacttttgtttctgcacataaataacaccatggcaattctgctgaaaacagcgtcagtccgggttagttccattcaaatcatgcaagttagagtccaaaacaagggcaaaagtgtttggaaaagtagatacgacggagacctatcaactcccccaagcttaaacctttgcttgtcctcaagcaattcaattgataaactgaaagttataaagaaaaacttt

SEQ ID NO: 8875 - DNA, 395 bp, Triticum aestivum
  Clone ID: LIB104-055-Q1-E1-A4
cgggtcgaccggcggccgtagatagttcatggtcgctactcactccgatggaggccagggagcatttggttactggatctatccgctgggagatggtagctcgggatatcttcaaccggtttggatggcagtcatgtaatagggtaggcaattagtttacctatttatctttagccagccggttgtggcgtcttatcttggctagtctgtgtgtccagcctctttaactctgtgtgagctgtctttttactacttttcggtcggagactttggaaccttgttggaactttttatttcgttaataagatggccgtatgcatcactctgatgcagtggccggggagatccccttttcgaaaaaaaaaaaaaaaaaaaaaaaaaaaagcggccgctct

SEQ ID NO: 8876 - DNA, 405 bp, Triticum aestivum
  Clone ID: LIB104-055-Q1-E1-A5
cgggccgacgggagagcgcgcggcggccgacgggcgatggcggcggcgacagcgggaggagtttgatttgggggacgtggtcgtggggaagaacgaaccgtgcggttaagtcagaagtagcagtagcgcgttccaagaagtgcgctactgctaagctagctacagcgcattcctctatacgcgctactcctattcctttttcttttttcccctttttcatttatttttctttacattttattttttttcctttcacctttttctatttctttcattttcatttactttccatttaattttatttcctttagcagtagcgcctttcatcgtaaacgcgctgctacaaagcaggtagtggtagcgcggttctacgtacatcgctactactatgcgtagcctatcggc

SEQ ID NO: 8877 - DNA, 405 bp, Triticum aestivum
  Clone ID: LIB104-055-Q1-E1-B1
ggatcttaatgtaggagaattcccagatcttaaacttcttgttgactgggcagtcaattcgggttttcatcttgttcagctccttcctatcaatgatacttctgttaacaagatgtggtgggattcatatccatatagctcactctccgtatttgcgttgcaccccttgtacctgagagtgcaggcgctttcagatgctattccagcagatgttaaggaagagatttcgaaggcaaagaaggagttggacaaaaaggacgtcgactatgaggcagcgttggccacgaaactcagaattgcccaaaaaatatttaatttagaaaaggacaaagtgctaaattcagctccgttcaagcagttcttatctgaaaatgaggaatggttgaagccatatgctgcattttg

SEQ ID NO: 8878 - DNA, 458 bp, Triticum aestivum
  Clone ID: LIB104-055-Q1-E1-B11
cgggtcgaccgcacctgaatacagaaacctccaatctgcagtgtacatggaatagcgcagtctatggtcacatcatccccttccccttcaaaagaaaccgtcctcggtttcgaggcagtctttgcaaccttcttcttcaatgtgacatgtccatccccttgattgcgttctcaaacatcggccgcagcacgcgtcgcttcctagaatcccagaatgaatatgtattcgtccgaccttcatgtgtagcattgtgatcatattgccatggtctccccaataacaagtgacatgcatccataggtatgacatcacatatcaccatatcagtataatcaccaacataaaatttgacgcgcaccttatgagtaacctttaacttccctgtatgatacatccactcgacatggtgggggttgcgggtgcttccatacaggcaaccccaaagcttcaacaaaccc

SEQ ID NO: 8879 - DNA, 479 bp, Triticum aestivum
  Clone ID: LIB104-055-Q1-E1-B12
cggtcaggaaggccgggtcggccggtctcagaaggtaaacgatccagaaatcataccaaggttagagaatgatttggtgaaatgtcttgtcagtttcgagttggtgttcccaccatccttcttcaacatcatgacgcacgtcctagttcacctatgcgaagagattaacgttttgggtcctgtatttctacacaatatgttcccctttgagaggttcatgggagtcttaaataaatatgttcataaccgtgctaggccagaaggaagcatctccaagggccatgaaaatgaggaggtcattgagttttgtattgactttattcctgaccttaagccgattggtgttcctgaattgcggcataagggcagactagatggaaaaggcacgctaggaggggaacaaataatatgtatggatggacattctctcactgaagaacactacacagttctacaaaattccgccttggtggctccgt

SEQ ID NO: 8880 - DNA, 440 bp, Triticum aestivum
  Clone ID: LIB104-055-Q1-E1-B2
ccgggccgaccggtgcgctaacagagagacaacctggaagttttagagagtcatttatttctgttgagtgcttttataaagtttaaaaacaaaaaataaataaagaggggaacccaaaaatttttcaaaaaggaaagtgaaagtgaaagagacaagcatggttgaagtgggggagctccttgaactttgttcatgctcacggaaactttgtgaatcttgattacagaaacttttcaataaaaataattatccccttgtacaattccattgtattataaaaataatgtgccaaggtttgcctttaggatgtttacaatgcttgttggtttgtatggtgcaggacagaaactttgactgtagcgcgtggtttttaatttttttactggaacgtcaaacggttctgattccttttgcactgtccttccaaacaaatgttttaa

SEQ ID NO: 8881 - DNA, 422 bp, Triticum aestivum
  Clone ID: LIB104-055-Q1-E1-B3
gggccggccgggaggttgagaaactgattggcaggatagtgaagtggctgaagcccggtgggcatattttcatcagggagtcctgcttccaccagtctggggattccaagaggaaagtgaacccgacgcactaccgggagccaaggttttacaccaaggtgtttaaggaatgccactcctatgaccaagatgggaattcctttgagctttctctggtaacttccaagtgcattggagcttatgtgaagagcaagaagaaccagaaccagatatgttggctatgggagaaggtcaagtgcacagaagacaaaggctttcagagattcctggacaatgtgcagtacaaatccactggaatcctgcgttatgagcgcgtgtttggggagggttatgtcagcaccggtggattcgagaccacaaaa

SEQ ID NO: 8882 - DNA, 383 bp, Triticum aestivum
  Clone ID: LIB104-055-Q1-E1-B4
gaccggggaaaaaaaaaaaaaaaaaaaaaaaaaaaaaaaaaaaaaaaaaaaaaaaaaaaaaaaaaaaaaaaaaaaaaaaaaaaaaaaaaaaaattaaaaaaaaaaaaaaaaaaaaaaaaaaaaaaaggggccccccaaaaggttcaaacctaacttacccttgaatgcaacttcaaacccctccaaaattgccaccaaatttcaattcacgggccttcttttaaaaacttcttaacgggaaaaaccctggcttaaccaaattaaacccccttgaaaaaaacccccttttcccaaccgggcttaaaaccaaaaaggccccaaccattcccccttccaaaaatttcccaaccctaaatggcaaatggaaccccccctttaccggc

SEQ ID NO: 8883 - DNA, 428 bp, Triticum aestivum
  Clone ID: LIB104-055-Q1-E1-C1
ggtcaagaaacccgggccgaccgggagttacagaatggtccggaggtaaagatttatatatgggaagtcctattttggccaccaaaaaatgttcggtattgtaccgggaaggttctggagtggggcccacttgcttggggggcccacatgaacgtgggtagtgggggcaaggccccacacccctggtcaaggcgcaccaagatccccccttagaaggaataagatcatatcccgtagggataggatcaagatccctaaaaaggggggataacaatcagtggggaaggaaacgatgggatttcttttctcccacctttgccaacgcccaatggacttggagggcaagaaactagcccctccacccctatatatagtggggaggcgcatgggagcttcacccttcccctggcgcagccctctccctcctc

SEQ ID NO: 8884 - DNA, 443 bp, Triticum aestivum
  Clone ID: LIB104-055-Q1-E1-C10
cgggtcgaccggatgctagctatcatacgatcatgcaaagcaatatgacaatgaatgctcaagtcatgtatatgattatgatggaagttgcatggcaatatatctcggaatggctatggaaatgccatgataggtaggtatggtggctgttttgatgaagatataaggaggcttatgtgtgatagagtgtatcgtatcacggggtttggatgcaccggcggagtttgcacaaactctcgaggtgagagagggcaatgcacggtaccgaagaggctagcaatggtggaagggtgagagtgcgtataatccatgtactcaacattagtcataaagaactcacatacttattgcaaaagtctattagctattgaaacaaagtactacgcgcatggctcctgggggatagattgggaagaaaagacaacgctccgtccccaacgcca

SEQ ID NO: 8885 - DNA, 392 bp, Triticum aestivum
  Clone ID: LIB104-055-Q1-E1-C11
atgctagcaatcatacgatcatgcaaagcaatatgacaatgaatgctcaagtcatgtatatgattatgatggaagttgcatggcaatatatctcggaatggctatggaaatgccatgataggtaagtacggtggctgttttgatgaatatataaggaggcttatgtgtgatatagtgtatcgtatcacggggtttggatgcaccggaggagtttgcacaaacactcgaggtgagagagggcaatgcacggtaccgaacacgctagcaatggtggaagggtgagagtgcgtataatccatgtactcaacattagtcataaagaactcacatacttattgcaaaagtctataatctattgaaacaaactactactcacatgctcctgcggggat

SEQ ID NO: 8886 - DNA, 372 bp, Triticum aestivum
  Clone ID: LIB104-055-Q1-E1-C12
cgggtcggccgggacgaaggcgataagtactgagttgatcaagcatgggtacgtgcttaattgggtggcagtgttgtgcacttcatgccgtatgttgttcttctctgtccctgtttgcttgccgttgcatctgtgatgttcggtggttagcagagtacaaaaattgtcagattggttcgggtgcactgacggctcggtgccacatagtctgtgaggaggtggtatcgatacatcataataatgaacgaagattttttgtactgcaagttgcaggggtatgtcttcctttgttttgttatgaaagcaaagcatgttagaccatacgatgtctgttaaaagaaaagaccatgcgatgcaaattttattagtcct

SEQ ID NO: 8887 - DNA, 378 bp, Triticum aestivum
  Clone ID: LIB104-055-Q1-E1-C3
ggagagtcatttagaatagcatggtatttgatatggttacaaatttggtcctagaatgatgagcattcacgttgggtataataaaaactatcataggaagtgaattggatgctatgatcaatttgttgcttgataattgttttgaaatacgaaggtagtaatgttagggtcatgctagtggataattatgaaattgagaaatacttttgttgaagttggcaagtcgtgtagcatgcacgtatggtaaaagttgtgtgacaaatttgttgcatgaggtgctcttttgattgtcttccttacgattggcagccggggacgagcgatggtcttttcctaccaacatatacctcttggggcatgtgtagtactactttgctt

SEQ ID NO: 8888 - DNA, 417 bp, Triticum aestivum
  Clone ID: LIB104-055-Q1-E1-C4
ccgggtcgacggggtcggctacatgagcggcggctgcaagagtgatgatggaagtttgagttgtggatattcaagttttagaggaaaaagggcaaccatggaagacttctttgacataaaatcatctaaaattgatgataaacaaataaatctctttggaatatttgatggtcatgggggttcacgtgctgctgagtatttgaaggagcacttgtttgagaacctcatgaaacacccacaattcatgtcagatacaaaattagcaataagtgaaacatataaaaaaactgattcagatttcttggattctgaaatcaacactcacagagatgatgggtcaactgcatcgacagcagttctgcttggaaatcatctttacgtggctaacgtaggtgactctcgggctgtaatatcaaa

SEQ ID NO: 8889 - DNA, 118 bp, Triticum aestivum
  Clone ID: LIB104-055-Q1-E1-C6
tgaagttcataacaaactcactttggaaaattttggtcatgccagttcacatgttccaattattttaacgattcgtgttcaaaactcatcgcacaccacaatttagctttaaacacac

SEQ ID NO: 8890 - DNA, 453 bp, Triticum aestivum
  Clone ID: LIB104-055-Q1-E1-D10
acggtcaggaataccgggtcggccggacctaagttagcaaaaaacgatccatttcacctaaattagctcttaaatgatccatttcacctaagttaggtcataaacgacccatttcaactaagttagctcataaaagctcataaatgatccatttcacctaagttagctaaaaaacaatccatttcacctaagttagctcacaaacaatccatttcacataagttagctcataaacgacccgtttcaactaagttagctcataaatgatccatttcaactaagttagctcacaaacaacccatttcaactttgttagctcatatatgatccatttcacctaagttagctcataaatgacatatacttcttgttctagtcttcttcttgttctagtcacctatttctaactttcttatttaccattttgcagatttcaattcacttcatggaagc

SEQ ID NO: 8891 - DNA, 480 bp, Triticum aestivum
  Clone ID: LIB104-055-Q1-E1-D12
cggtcaggccagtccgggtcgaccgggtggccttcaaggagatgccgaaagaagggtgcttgaccgtgagaagggggtccgtggcgtggattgggtcagggccagagttcctgatcagcctagctgaccacgcggagtggagagacgcctacacggtgttcgggtccgtggtgccggaggacatggccatcgccgaggagatgtcgatgctccccgccagcacagacgtctggagcggtgtgaccgtcaggctgctgaaggacccggtgtatatcaaggtgaagagaagaagcaatgcgactgcctattgagctcgccagcgattttgttcttcttcttcttcttctttcacatgatgtagcagtagtgccaaaagataagaacacaaaattacatgtccaaacaaagaaagaaagaaaatagaggaggtttggaagagaactgttacacctgtggtttctgtgcccgtcagcaagccat

SEQ ID NO: 8892 - DNA, 400 bp, Triticum aestivum
  unsure at all n locations
  Clone ID: LIB104-055-Q1-E1-D3
gaaanctaacctacggcggctactccagcatggtggtggtgcacgagcgcttcgtggtccggttcccggacgccatgccgctggacaagggcgcgcccctgctgtgcgccggcatcaccgtgtacacccccatgaagtaccacgggctgaacgctcccgggatgcacctcggcgtgctgggcctgggcgggctcggtcacgtcgccgtcaagttcggcaaggccttcgggatgaaggtgacggtgatcagctcatcgccggggaagaagcaggaggccctcgagaggctaggcgccgacggcttcgttgtcagcaagaacgccgacgagatgaaggctgcgatgagcaccatggatggcatcataaacacggtgtctgcaaacatccccatggcccctct

SEQ ID NO: 8893 - DNA, 356 bp, Triticum aestivum
  Clone ID: LIB104-055-Q1-E1-D4
cgacggggaggccgggtggcccacccaggcggagcccgggcagattggcgtcggggtgcaggaggccagggacttcaacgagggcatgattcgggtgtgcagcagcggcaagggcacgccgctgatgcccaacaggacgttcgagacctacctcttctccctcttcgacgagaaccagaaaccagggccgatcgccgaaaggcactttggcctcttcaacccagacttcacgcccgtctacgacctcggactcctccgggacggcgcgtccgtggctccaaccccttcgccgaacccatcgcccaatccgagccctaagcccgcgccgtcgggaggccggaagtggtgcgtcgcca

SEQ ID NO: 8894 - DNA, 384 bp, Triticum aestivum
  Clone ID: LIB104-055-Q1-E1-D7
gcggatcttgataagccatcagagaaagaagttgacactgttgtcaagccatcagaggacagcatggctgttgaggagcctgtcaccgacaaaccatcagtggaagatgaagccagtgctgagccatcaaacgacagaatagatgccgagaaaccatcagaggagaaagaagacgacactgtgaagtcatcagaggatagcatggctcttgagaagccagccactgacaaaccatcaaaggaagaggaagaaggcgcagccaccgagaagccgtcgcatgacgatgctgccatcgaggcaccatcgcaccacgacacggactcggccaccgacataccctcgcctgccacagagacgaacatatcagcctgagctcaacaagac

SEQ ID NO: 8895 - DNA, 472 bp, Triticum aestivum
  unsure at all n locations
  Clone ID: LIB104-055-Q1-E1-E11
gggtcgaccggttatgcatggtgaactttgccacaaatacgatgtcaactacatgatcatggaaggcaatataacaatagtaatgtatgtcatgatgataaacagaacggtggaaagttgcatggcaataatatctcggaatggctatggaaatgccataattaggtaggtatggtggctgttttgacgaagatataaggaggtttatgtgtgaaagaccgtatcgtatcacggggtttgtatgcaccggtgaaagtttgcaccaactctcaaggtgataaagggcaatgctcggtactgaagaggctagcaatgatggaaagataaaagtgcctataatccatggactcaacgttagtcaaaagaactaatatacttattgcaaaaatctacaagtcatcaaaaaccaagcactacgcggaagctcctagagggatagattggtangaaaagaccatcgctcatccccgac

SEQ ID NO: 8896 - DNA, 413 bp, Triticum aestivum
  Clone ID: LIB104-055-Q1-E1-E12
ccgggtcgaccggctgttcttcatacctacagtccacgaaaaagccacaaaaaaaattagggttagttcatcatatccgaaccaatctgagcctttgcataatctttttagggttttgctttgttgaatttgcggttgcatcgtcgtgtctagttgctggtcttagagtctagtcttttagagtttcgagttctggtcataagttgtcacgccgccgccgcactatcatcatcgcccctgccatctaccaccaccgcttatccgccactgctccgaatctgtatccatataccaccaccaatccgtgtccatataccaccaccgatccatatccatatactaccaccgctaccaccaccgctgccatataccaccaccatatatccaccaccaatccgagttccttgcatatt

SEQ ID NO: 8897 - DNA, 398 bp, Triticum aestivum
  Clone ID: LIB104-055-Q1-E1-E3
ccgggccgaccgggagcacaagaaagcggaggagcacaagaagaaggacggggagcacaagaaggacggcgagcacaaggagggcatgatggagaagatcaaggacaagatcagcggcgacggccacggcgacggcaagaaggacggcgaccacaaggagaagaaggacaagaagaagaagaaggacaagaagcacggcgagggccacaaggacgacgacggccacggcagcagcagcagcgacagcgacagcgactgagccagctccggccgcgctccggcagcagcgtgcagtgtaggcgagatcgatgaacgcttgggagaagtgtggcatacatatatgttgcagggtttggagcgtgtggtagcatatgtatgtaatgcgtgacatgcctcat

SEQ ID NO: 8898 - DNA, 439 bp, Triticum aestivum
  Clone ID: LIB104-055-Q1-E1-E8
aggtacgatctagaattcccgggccgacgggcacctctacaaactggggatgcatccgaggcgaaaacagtgtccagcaaattcccgtgtgggtaatatttggattcataactctagcaaagaggctatctgggtgttgtagcagtctccacccttgtttcgcaaggagggcgaggttaaacaggtgcatatccctgaaaccaatcccatccgcccgtttaggacgagtcatgtgttcccacgacatctagtggaccttcctgtgaccttcttcatcaccccaccaaaaatcccttaccattttctcatacttgtcacagaaccctttggacaggaggaagacgcccatcgtgaagcaaggaagcgcctgaaccacagatttgacgtgtacttccttggccgcataagacatgaatttttccgaatagtcacaacaact

SEQ ID NO: 8899 - DNA, 483 bp, Triticum aestivum
  unsure at all n locations
  Clone ID: LIB104-055-Q1-E1-E9
cggtcaggccagtccgggtcgaccggaagaggcggctgatggaggccgagccctccgcaccggagttcaagcccaacgtcaccgtcgccgctgacggcagcggcgacttcaagaccatcaaggaggcgctcgcaaaggtgccgcccaagagcgcctccatgtacgtcatgtacatcaaggccggcacctacaaggagtacgtctccgtgggccgccctatcaccaacctcgtcgtcatcggcgacggcgacgacaagaccatcatcaccggcaacaagaacttcaagatgaacatcaccaccaaggacaccgcaaccatggaggcaatcgggaacggcttcttcatgaagggcgtgagggtggagaacacggcgggggccgagaaccaccaggccgtggcactgcgggtgcagagcgaccaggccgtcttctnacagtgctacttcgacgggttacaagacacgctctacnaccacgcgcaac

SEQ ID NO: 8900 - DNA, 405 bp, Triticum aestivum
  Clone ID: LIB104-055-Q1-E1-F1
aggcacggtccagaagcccgggtcgacggggagcacaagaaggacggcgagcacaagaaggacggggagcacaaggagggcatgatggagaagatcaaggacaagatcagcggcgacggccacggcgacggcaagaaggacggcgagcacaaggagaagaaggacaagaagaagaagaaggacaagaagcacggcgagggccacaaggacgacgacggccacggcagcagcagcagcgacagcgacagcgactgagccagctccggccgcgtgcagtgcaggggagatgaacgcgtgggttaatttggagcgtgtggtaacatatgtatgtaatgcttgacatgtctcatggatcttgtaatgtaataaccggctgcactgcatggtgcttgtaataataacgtt

SEQ ID NO: 8901 - DNA, 353 bp, Triticum aestivum
  Clone ID: LIB104-055-Q1-E1-F11
cgacgggaacaaatgtagaaattgaagtacctgtaccctatgatgccacaaacccaaatataaggacttcaatgggttctgcggcatatgcacccgagagagacgcaatggtctggaaaattaaatcatttcctggtggcaaggaatatatgtgtagagcagaatttagtcttcccagcataacctcggaagaagcaacccctgaaaagaaggccccaatacgtgtgaaatttgagataccatattttactgtttcaggcattcaggttcgttatctgaaagtgatcgagaaaagtggataccaggccctcccttgggttcggtacatcacgatggctggtgaatatgagctg

SEQ ID NO: 8902 - DNA, 333 bp, Triticum aestivum
  Clone ID: LIB104-055-Q1-E1-F12
ccgggtcgaccgtagcccgtggaggatggcggatgtcgatggtggagatgaacagtatcccgtggagtcgcgttttgcggtacgccacacccctcccaatgagatatgacccccattccttctccccgcgctagaacagagatgcgcctcagtagggcagcagcagcagtagcgtctccatggacgcggtggcatgacagctcccaggcacggatcccctcctctgcctccatcctccacctctccggtcggcctgttgcaatgtccgaagcagcagcaagcgacctgcagcagctcgttcctacgttccatggacgagctcgatggagacat

SEQ ID NO: 8903 - DNA, 285 bp, Triticum aestivum
  Clone ID: LIB104-055-Q1-E1-F4
gggagaaggagttcaaggtgaaggtggcgtcggaaaaggacaaactcgggaggggctacgtctttgggaagctcctctggtccgatgggacccactatgtgaggagccccatcgtggtaaatgccctggattgagattttttaattttgtggtgtgtagctcaagggaaggaagtgtccacagtttaggaattttatttttcagtttattactgagaatgagaagagtttaggttttagctctcctggttgctaataaacgctatttggctctaaaaaaaaacaa

SEQ ID NO: 8904 - DNA, 475 bp, Triticum aestivum
  Clone ID: LIB104-055-Q1-E1-F9
cgggtcgaccttcacatgacaccaaaaagggaatcacaacatacatactatcaaaatatcgaacacatttcaagttcacatgattacttgcaacatgatttcccccgtgacctcaagaacaaaaataactactcacaagtgataaacatgatcaagatcaaaggggtattaaatagcataatggatctgaacatataatcttccaccaaataaaccatatagtaatcaattacaagatgtaatcaacactactagtcacccacaagcaccaatctatagttccagtaacaagattgaacacaagatattaactagggtttgagaggagatggtgttgttgaagatgttgatggagattgccctccccaagatgggagagttgtcggtgatgatgatgacgatgatttccccctctgggagggaagttcccttggcggaatcgctccgccagagggcaaaagtgctcctgcccaag

SEQ ID NO: 8905 - DNA, 412 bp, Triticum aestivum
  Clone ID: LIB104-055-Q1-E1-G3
cgggccgaccggttgttagagcatgggcataccttttgtagaaagaattaaactctcttgcttcacttatatctatttagagagtgacaggaactggtcattcacatggttagtcataaaatcctacataaacttgtagatcgctgaatatgatatgtttgattccttgcaatagttttgcgatataaagatggtgatattagagttatgctagtgggtggttgtggattgtagagacacttgtgttgaggtttgcaagtcccgtagcatgcacgtatggtaaccgttgtgtgacaaatttgaagcatggggtgtttctttgattgtcttccttatgagtggcagtcggggacgagtgatggtcttttcctaccaatctatccccctaggggcatgcgtactagtactttgc

SEQ ID NO: 8906 - DNA, 378 bp, Triticum aestivum
  Clone ID: LIB104-055-Q1-E1-G4
cgggacgcgagtaaactcgacgagcacagaacgccgcccgccgcccgccgccgtcgttcgctgggtttcctcggagtttgtctgacttctccaatcacagcattgcagagggaaaatagtaatggggttgataaatgctaaccctgtgattcatgagaaaagggagaggcgcatccggcaggcaccagaaaacatagatgaaaatgcaccagaggccatataccagcttgaaatatttgatcatattagagacataaaggacccagaacatccatactcattggaagaccttaatgtggtaaatgaagactcagtcgaaatcaatgatgaacttagtcatgtcacggttactttcatcccaacagtggagcattgcag

SEQ ID NO: 8907 - DNA, 415 bp, Triticum aestivum
  Clone ID: LIB104-055-Q1-E1-G8
aattcccgggccgacggggatgcggtggaagacgatgatggcgaaccacgaggacagcccgcacatccgagagaaggtgctctacgccgtcaagcgctactggaccgccgacagcgacaagagctcccaagagaagaaggcaacttcttctgaggtgtgaaatataatggtgagtgagatgagctgagctgatgcactgcaactcaggagatcagcgtgtgtttatttcaacttcttgtgagtttctctcgagtgtagcagtgagatcagcacgtgtattcctttttgattacgtcgtgtaggatgaacacttcttttccattttttcgagatgagatggtaggaaatattcgacacaaagatctacgtaccattttctgcccgtcacagattcaagaatgttgttatggcactc

SEQ ID NO: 8908 - DNA, 406 bp, Triticum aestivum
  unsure at all n locations
  Clone ID: LIB104-055-Q1-E1-H10
ggggtaaataagaagttagagttatggagacaaaccttggaatcgaaagggtttagtcttagtagaactaaaaccgagtacatgatgtgcggtttcagtactactaggtgtgaggaggaggttagccatgcacaggtggtgcctcagaaggaggacacctttcgatatttggggtcaatgctgcaggaggatgggggtattgatgaagatgtgaaccatcgaatcaaagccggatggatgaagtggcgccaagcttctggcattctctatgacaagagagtgccacaaaagcttaaaggcaagttctacaggacgacggttcgacctgcaatgttgtatggcgttgagtgttggccgactaaaaggcgacaggttcaacagttangtgtggcggagatgcgtatgt

SEQ ID NO: 8909 - DNA, 243 bp, Triticum aestivum
  Clone ID: LIB104-055-Q1-E1-H11
acggttctggtgttcgccctagtattccagacgctttaaccttattatagctgtcccagcgtatatgctctgcggtttcagatgaagcgagaatgtcttatcatgtttgcggcaaccaattcgcgactcggatcgaatacatggggcgtcattctatttcagctgtcgctcgacaggatcgattcttacttacccctgcatgctactttctagttcttctatattgtcacctaacttcacttc

SEQ ID NO: 8910 - DNA, 425 bp, Triticum aestivum
  Clone ID: LIB104-055-Q1-E1-H2
gggtcgaccggagtaatgattatatttataaaacttgtcatgattatgattaccctttttctgaacattactcttttaatgtggaaacaatttatagattcgagtttcttatgacactcccactattccgaatgagaagaattttgcttatgtggagagtagtaaattttctatgcttgtagatcatgaaaagaatgctttatgtgatggttatattgttgaatttattcatgatgctactgaaaattattatgagggaggaatatatgcttgtaggagttgcaataatatcaagtttcctctctatgtgttgaaaatcttgaagttatgcttgttttgccttcctatgctagttgattattgttcccataagttgtttgctcacaaaatccatatgcataggaagtgggttagacttaaatgtg

SEQ ID NO: 8911 - DNA, 404 bp, Triticum aestivum
  Clone ID: LIB104-055-Q1-E1-H4
caagaacagtggtcaaagatctgaattatggacgcttaaacaagatggaacaagactttggttatctaaggctcaggctcaatgaagcatttgacacaatagacagggttgccaaaggatatttgtatgctataagatacatgccagctttcttacatcagcttcataatgtgatagcacatacttttcctcctactcgtgttgtggacaagtcaacaaatgaggctctcaagaatattgaggtggtagctcataatctcaggacagaagcaatagtcttgaaaacaagctatatgtgttgagaaggcagagtcaagcgcgcctgaacatgtgtatcttgctttcggaccaaatcctttgtacttgtgtggaccaactttttaatactaacggccttgttccgt

SEQ ID NO: 8912 - DNA, 293 bp, Triticum aestivum
  Clone ID: LIB104-055-Q1-E1-H6
acgggtgcttctgtttcagtttggttcagagtcaggtcctggatgttgtcaagtttgtttacttatgggcacttgtgtattggtttattgctgggcattatgccttgatattaaagatttccgcccagtacatattgttgcattttgtgaagaaaaaaaaaacaaaaaaaaaaaaaaaaaaaaacagaacaaaaaaaaacaaaacaacaaaaaacaaaaaacatcaacctaaacaaaaaagagaacaaaaaaacaaaaccagcaatcactaaaaagtcaaaaaaaaagcggcc

SEQ ID NO: 8913 - DNA, 475 bp, Triticum aestivum
  Clone ID: LIB104-055-Q1-E1-H9
acggtcaggtattccgggtcgaccggcaccccccagccacgagtgctggggtgttcgggataaacttgagcactcttgttcccatttttgggtccatctagggaggcgctcaacacaacgaaccaggcaaccggacttataatgcttgaacactctcacttagccatagaattctataattttaaatttcagcgaagcccctagtcttcggaaggccgaatttggggcgctatccacgcctgggctggacaaagctggctcctcgctctaagcggcataagtctttagggacttgcaaaaaacctcttgaacagcgaccagctctcgcctcatcataacggtcagttttagctttctccattgaggcactcgcccagctcaactggggcgcaatcgcagtggttctcccagtgctaccttagtcgatacaatggaacgtaaggtaccaaaacatgggagccgggcaaaccaacta

SEQ ID NO: 8914 - DNA, 391 bp, Triticum aestivum
  Clone ID: LIB104-056-Q1-E1-A1
cggggatggcgacactcaccaccgccaccctccttcttcaagcatccggggacgcgagcccgggcgttcagaagcagcgctacccagacctgaccaaggccgacgaggaatgctttgaaacctgctacaaggagctgaccaatggcggccaaaaactcgacaatttgtgcaccagcaaagagggctcggacgacatcggcatggcccagctccccgaaatccgcagcttcatcaaggagaacaacggggcgcatgcccagtggaattgcgataggtgtcgccctgcgaatgacaagaagacacccgacgatgtctccaagaagaacgatgccgagaaggccatggctgtcctccacgtgctcgtcaacaaagtgaccaaataatgaaaaac

SEQ ID NO: 8915 - DNA, 440 bp, Triticum aestivum
  Clone ID: LIB104-056-Q1-E1-A10
tagcgtcaacaattcaaggtcgacggggaggcggagctgcaaacaaggagtgaaggtttcaacttggaagggaaggcgaaaacaggggaaatgtggcttttggtaagggggagggggcggggaggaagatatttccacacaagccgaaaaattggaatcgcttcagcgaaaaaactggcgcgcaaagtgtcatcagacatggtcccttattcagaactgtgtatgatatgtgaaaatcacaaatgattcagataacttaacccatgtgtgttgagtttgaacgtcaaaatttttggttcgaatttccctggttacagtggccatccacgtcattgcataatttgggtacacaaaggagactaacttcttaatcgagcaagttcagcaattaaacatagctagctgacctaaacattactctaacaaattaaagaccgacg

SEQ ID NO: 8916 - DNA, 427 bp, Triticum aestivum
  unsure at all n locations
  Clone ID: LIB104-056-Q1-E1-A11
ccgggtcgggcgagccgcaaaggtgcactgtcctccttcgccgtctttgggctggccattgtgtggttccttcagatgaactctgaggacgaggagtacatctccctctgatgtggttcctcgctagagatagggatcatcaaattgtgaatatctacagtacgatttggagcattggtgtttgagcttgtttgtaccagtgaagtgaggcattttcagttgcatgtagagttatcctcttcatgcagtcgtgctagtacatgatgtttgatgtttttgtgcaggctcttgacctcacttgcatcactcagttgtttgctatggcatcactgcatactctgcctaggtttggccattttaatttttctgtttcctctgcctgtgcctcgagtagtctctagtantagttgccacgagatgggagcaa

SEQ ID NO: 8917 - DNA, 440 bp, Triticum aestivum
  Clone ID: LIB104-056-Q1-E1-A2
cgggtcgacgggtgctagtatttatgcatgctatgataatttgttttcctataagatttctatgcataggaagtatgttagactcatatgtgtttgtcacatgttttatgatgctctctttgtgattcatttgctatcattcatgtgagcatcattaaaattaccaatgcctagctaaaaggccttaatgaaaagcacttgttgggaggcaacccaatatttttcttttctgtttttgaataagtaattcatctagcctatgtttagatgtgttttgtgttttaattagtgtttgtgccaagtaagacctttgggatggcttatggtgatagttgttttgatcttgctgaaaaacaggaacttttgcgcccaggaaaataattttcatttttttaaataagcgtgcttttgatctgattatttttgcacagattgcacac

SEQ ID NO: 8918 - DNA, 399 bp, Triticum aestivum
  Clone ID: LIB104-056-Q1-E1-A3
gacgggtaacatcacggtagtgtattttgctggagagaataattttggacaacattaaggtggcaaatttaatacacatctgggtgggttgtttggggcacctagagaaaccggtgcttgcccatgggaatcccggagtactcgtgtgattaccctaggcccgccacccaggctcaaaggaatcatatgatatttcatgcctagaaacttccgtgtgcagccacaagccattatgggctctggcatagttgagtgagttgtgtaacctctttcagtggtggactagcagatgtaggggaaagtaggtgtatcggtctacccagagtaaagagttaatgcttcagaaagactatgtctcaatcttccgatcatggatgtggtcgagtcttgtggggaaaa

SEQ ID NO: 8919 - DNA, 411 bp, Triticum aestivum
  unsure at all n locations
  Clone ID: LIB104-056-Q1-E1-A5
gaagtgtatttttttgtagtggtaagatctgttagtataataaagcaaatcaccactctaagtactgtagcaaaccaattcatattttatttttgcattgtgtctactttaatatagcttttccatggcttaatccactgatataaattgatagtttcatcaaaacaagcaaactatgcatcaaaaatagaatctgtcaaaaacagaacagtctgtagcaatctgaacattcactatgcttatgctacccccaaaaattctaccaaaattaggaaacataaacaagttgtacatcaagacagttcaaaaggaatcagaaccgtttgacgttccagttgaaaatgtaaaatcgtgcactacagccaaagtttctgtcctgcancgtacaaaccaacatgcatttgtaacatc

SEQ ID NO: 8920 - DNA, 427 bp, Triticum aestivum
  Clone ID: LIB104-056-Q1-E1-A6
acgggtataatcacggcagtgtatttttttgtagtggtaagatctgttagtataataaagcaaatcagcagtccaagtagtgtaacacatcaattcatattttatttttgcattgtgtcgactttaagatagcttttccatggcttaatccagtgatataaattgatagtttcagcaaaacaagcaaactatgcatcattaatagaatctgtcaaaaacagaacagtctgtaccaatctgaacattcactaggcttatgctatccccattcattctaccagaattatgaaacatacacaagttgtacatcaagacagttcacaatgaatcacaaccgtttgacgttccagttgaaaatgtacaatcgtgcattacagccaaagtttctgtcctgcaccgtacatactagcatccattgtaaacatct

SEQ ID NO: 8921 - DNA, 378 bp, Triticum aestivum
  Clone ID: LIB104-056-Q1-E1-A7
gggtcgacggggatctcaatgttggttatttaccggagagtcgtctcggtcatgtatgcgtgtctcccaaacccgtagggtctacacacttaaggttcggtgacgctagggttgttgagatattagtatgtggtaacccgaaagtttttcggagtcccggatgagatcccggacatcacgaggagttccgaaatggtccagaggtgaagaattgtatataggaagtccaatttcggccaccaggaaagtttcggtggtcaccggtattgtaccaggaccacttgaagggttccggggctccaccgggtggggccacctatcccggagggccccatgggctgaagtgggaaggggaacagcccctggtgggctggtgcg

SEQ ID NO: 8922 - DNA, 471 bp, Triticum aestivum
  Clone ID: LIB104-056-Q1-E1-A8
ggtaccggacgtacaattcgcgggtcgacgggtaaggggattgttgcgtatgggataaagagaacttgatgctttaatgctatggttgggttttaccttaatgatctttagtagttgcggatgcttgctagagttccaatcataagtgcatatgatccgagaagagaaagtatgttagcttatgcctctccctcaaaaaaaattgcaatagtgattatcggtctagttatcgattgcctagggacaaataacttcctcgtgacaaaaagctctctactaaaacgaacttagttgtgtctttatctaaacagcccctagtttttatttacgtgctctttatattcttgcaaacctatccagcaacacctacaaagtacttctagtttcatacttgttataggtaaagctaacgctaagcgtgcgtagagctgtaccggtggtcgatagaacttgagggaatatttgttctac

SEQ ID NO: 8923 - DNA, 420 bp, Triticum aestivum
  Clone ID: LIB104-056-Q1-E1-B12
cgggctcctagattggcaaggacaaatatccttccatggaccaaaccaaacggatacaaatgaacatgccacccgtgcttggaaaaatatcctggagcggcatgcatggacccgtaccgcctataccacgtgggcccggttacctgtccaggggcccactggcccgcgcgccaccaccccactgacactataaaaagaaccatgcgttcacagtccacggtcacaactcagaccaacacatctgctccagtcaaaactagctcttagccacaagcaggttaaaaatttcaacgaaatttcagtgaaatttccgaaatttcagtggggtgcgaaatatctttaaccctgaaagttcaatgcagtttaaaagtaaattcaaaataaatttaaaattttgtttaaattcagtaaaattaaatt

SEQ ID NO: 8924 - DNA, 318 bp, Triticum aestivum
  Clone ID: LIB104-056-Q1-E1-B2
cgggtcgacgtggtcgttgattatgccgcctgatccattgtcactggatgtaaagtggtaacagtttcttcttgtttaattacttccgaaaatgataagggctggtaagaaattgcacatatacatcaatttcctgtaaaattgtccgggccagaagtgtacctgcaaatgtggtttgtctgtaacgcaatgttgaaattttgtactgttcttgactacgttgctcccttttctccggaccagtggggtggttgatttcagcttattacctgaagttgtagatatatctatttgtcagtatggaaacatctactgtat

SEQ ID NO: 8925 - DNA, 240 bp, Triticum aestivum
  Clone ID: LIB104-056-Q1-E1-B3
aaattccaaggcccccaaggtcaaaaaggtcaacaattccggctcaaattgtcctaacggaaagcaccccaagccaacaatctgcgaagatgataaatgacaaatccggtgccatggtgacacagtccttcctaaggacgttttgaaaagctattgtgtttcgtgccggccattctacctaaatctcagttgttttctgttagagttatgtttcacgctcaagaataaattatttctgtg

SEQ ID NO: 8926 - DNA, 458 bp, Triticum aestivum
  unsure at all n locations
  Clone ID: LIB104-056-Q1-E1-B6
ttcgcgggccgacgggtggatgcaagcacttagaatcatccaatgggtccactctcctgaacttaagggtttggcaaggtacactacaagcaggagaaagaatcaagggccaaagagcaagcaagaatatggttgccatacaaaccatcaagttggaccagaatgaagatgaggttgatacactcaaatttttcaaacaacatcattgggtttttgcataaagttgaatcataagctactacccgcatcccataattttggtggaggctagaaggaagtatttaaatgagttgtagtgcaaaattgcccaatggaccagagaagaaaattgggtgtagagctcaaaatatttcatgaataaaagacatttttgcataaaagtgatttaaaaacatcacctgacatctccanattttggttggaactttaaatgaatttatcagatggttgtagttcaa

SEQ ID NO: 8927 - DNA, 404 bp, Triticum aestivum
  Clone ID: LIB104-056-Q1-E1-B8
attcgcgggccgacgggagcatcaacctagagctctgcatcatcctctacaagcaagtaccgaaccaccatggccatgccactcgccattgtgcaccaatttgacgacgatgatttccacagctttgttcatggatggctggcttacgaaaagctcacgccgacgcctccggtgtggcttcccctacgcctccagcatagggttcttgtacatgcgaaagtgcatgatttttcgatggttgtctagctgcagttgtctccccatgtaatggcatcaagttcagagcgccccaactgcctctccttcgaccgtggttcaggtagtggctcggtctccactgtactctatcccttgctctgtggtgcctggccattgtgcttagtccatgctgtgatccttgttgt

SEQ ID NO: 8928 - DNA, 411 bp, Triticum aestivum
  Clone ID: LIB104-056-Q1-E1-C10
attcaagggtcgacgggggagcatacgcgtaatactttgtttcgataactaatagatttttgcaataagtatgtgagttctttatgactaatgttgagtccatggattatacacaccctcatccttccaccattgctagcctctctagtacagcgcaactttcgccggaaccataaacctaccatacctacctattatggcatttccatagccattccgagatatattgccatgcaactttccactgttccattgttatgacacgcttcatcattgtcatagtgctttgcatgatcacgtagttgacatcgtatttgtggcaaagccatcgttcataattctttcatacatgtcactcttgattcattgcatatcctggtacaccgccggaggcattcacatagagtcata

SEQ ID NO: 8929 - DNA, 401 bp, Triticum aestivum
  Clone ID: LIB104-056-Q1-E1-C11
cgggccacaccatgatgcaggaaacataagcccctggtgtattttacccgtaccaaactgtacagatgcaacatgcagtacatgatcatatgtacataagtgaagtgcagttatcagcaaattggtgctgcattgtttattcaacaaagactgctgtacaggcatcacgatacaaatggtgcaataagcaagggatgggactgttacacatgtccccctccaagggtaagctgccgatggtgcttacaacagatttaatgctcgtaatgcataccacctggatattcattgtagcctttatccttccctgtctgtatgcatcgtcagttcggcaggtctgctgccggccagggcctctggcgaactgtgtcctacaggtaggcggcaagaatggaacaaaa

SEQ ID NO: 8930 - DNA, 345 bp, Triticum aestivum
  Clone ID: LIB104-056-Q1-E1-C12
cggggagcgtcatgtattatattagtctttgctttttagtttaccacaatcatccttgctgtacacaccttttgggagaagcctatttgattagaatttgctagaatactctatgtgcttcacttatatcttttgagcttgatagtttttgctctagtgcttcacttatatctttttgagcacagtggtgtcttaattttgaagaaattgctagtctctcattcttcacttatatctttttgagagtcttttagaacagcatggtatttgctatggttttaaagttggtcctagaattatgagcatccaagctgggtataataaaaactatcatagaaagtgaat

SEQ ID NO: 8931 - DNA, 167 bp, Triticum aestivum
  Clone ID: LIB104-056-Q1-E1-C3
atccgtaatggatgtgtgaataatgggaacttggatttgaatacacccactaacactaagttccttccgttgtgccaagctggtgtgaacttgtcctgctttccgcctgacctaactgatgcccctaattggggccctcgaaggaaacttcaacactggaatccttc

SEQ ID NO: 8932 - DNA, 403 bp, Triticum aestivum
  Clone ID: LIB104-056-Q1-E1-C5
gggccgacgggctcgacgacgtccttgtccagaacaataacagtgttatctccgaccatccagcggaagagaaggcataggccctggcgttgcggtcccgatggcgaaagaccatgcacgtcaccctgaagtttgagaggctgatgcccgcgtccgcgtccgcatcctcgccgccgaggagacagcgcccaacatgttgccgctgtggaaccacgctgagcgagggatttccttgtagtgccgcacaaggggatcgcagatgaggagccgtggcgcccgcgacctgtggaagaggagcaggaggtcgccccagatatcggcgagctcccagcggcaatcggcaaattcccccagcgggaggaagttgagcgccagatttcgatcggcgatggtgcccgcccac

SEQ ID NO: 8933 - DNA, 424 bp, Triticum aestivum
  Clone ID: LIB104-056-Q1-E1-C6
acgggataaacgagagagaaggaagtgcataatagatgtgttaatctgaacatacaaggtccatccagtagtcctacaataaaagaagagttagtatgtagttctagcacatcaaatacaacaggtttctcaagctctacatttagtgctttaggaaagattgacaaggacaagatggccatggagttggggtccctgcagacaagtaatccaactatttcaagtttccagtgcacacagtccttgagtcattcatctgaattatcatgctcttctcgaatatcaacaggatctaccctaccttccaaaactactaaggaactgtttggtattgagactgaatactgtgtggccaaggcttcacgtgcccaggttagtcaactggggaaaccttcttcaaagcaatccaatgaagtctcctggc

SEQ ID NO: 8934 - DNA, 433 bp, Triticum aestivum
  Clone ID: LIB104-056-Q1-E1-C7
gacgggaagtacaactggaagctgtactctgagaggttgatgaccctttctggtgtctatggtttctggaagtacgtctccaacctcgacaggcgcgagactcgtcggtaccttgaaatgctctacgccctcaagtaccgcaaaatggctgaaactgtcccattggctgttgagggcgagacctcgggcaaatgatttgtccttaccagagaaataaatggcgggcgagcgctccgctttaccgttcttgattcagtgatggagcacagatcggagcgtcttatgcctttgcttgtcctttgttaccgttcttgattcagtgatgaactttagttcctgttgagtccccgtgttgtcgcggtaggggaactggatggatgctgtgttgttggcactttctcatggatacagtatttgaatgaatgaataaaat

SEQ ID NO: 8935 - DNA, 442 bp, Triticum aestivum
  unsure at all n locations
  Clone ID: LIB104-056-Q1-E1-C8
acgggcaactatacagagttcctagagctccttgtacggcctgttggaaaacccgctgtcggacctgattcattgccctttgtttttcaaaataaagggtttcgtttttagacttttccaattgttccaaactaatagaagtagcattaatcaaatttgctttttctcgttctatctcagagtatccattcattcgatactcatccgcttctagttcgactttctgtaatcgaatccgagctttttcgagttgctcaatggtcnctctacgcaattcttctgaatttcgaatagtactcaagatcctctgttttcgattatctaataaatcttttaatgaaagtagattattttgtaagtttacaacttttatgatctcttcccgaaccaaacatgaatctttcgattcatttggctctcaagctccttatttttttttttt

SEQ ID NO: 8936 - DNA, 403 bp, Triticum aestivum
  Clone ID: LIB104-056-Q1-E1-C9
gacgggcgggggcaccctcctatctcgtggaggctccggttgtttcttgacttgcactccaagctctccggatcttgttcgttccaaaaatcacgttcccgaaggtttcattccgtttggactccatttgatattccttttcttcgaaatactgaaataggcaaaaaacagcaatatgggctgggcctccggttagtaggttagtcccaaaaattataatctctccctaataataaagcacgaattgggtctccgggttcaccgtcacaatgcgctttcttcttcccatgaatttacgctttcagtttttctcacctaatattattttccacatccaaggtggtactattttaactgtgtatactaaattcaacatgcagtccgttcgtaaagcctcgctcga

SEQ ID NO: 8937 - DNA, 444 bp, Triticum aestivum
  Clone ID: LIB104-056-Q1-E1-D1
ccgggtcgacgggtgacaacatgaccttgcaggtgactctggagcgcgacatgaccaacctgcccaactccgaggtcggcccggttcacgcccccaggttccccaagaccgaggaggaagggtggtggctggtggtcggcgacagctccaccaagcagctgctggctatcaagagggtcaccctccagaagagggcccgtgtgaagctcgagttcaccgccgccgcggagccagggacgaaggactacatgatctacctgatgtcggactcgtacctcggctgcgaccaggagtacgagttcaccatcgacatcaaggaagctggaggcgactaatttcaaacacccaaaactcttttttatactgggtttttgctcttatgtagacaatattatgtgacctggaacttatcatctttttgtctgtaatgttacacctgaattt

SEQ ID NO: 8938 - DNA, 359 bp, Triticum aestivum
  Clone ID: LIB104-056-Q1-E1-D10
cgatacgctctatcacacataaacctccttatatcttcctcaaaacagccaccatacctacctattatggcatttccatagccattccgagatatattgccatgcgacatccaccatcatcatcatgacatacattacttttgtcatattgccattgcatgatcatgtagttgacatcgtatttgtggcaaggccaccatgcattatttttcatacatgtcactcttgattcattgcaccatcccggtacaccgccggtggcattcatatagagtcatatcttgttctaagtttcgagttgtaatccttatgttgtaatcaatagaagtgtgatgatcatcattattagagcattgccc

SEQ ID NO: 8939 - DNA, 410 bp, Triticum aestivum
  unsure at all n locations
  Clone ID: LIB104-056-Q1-E1-D12
ctggaacgagcaaggttgatgcatcagtacagttctgaagatggagcggtggcagttggcggcggcggcctctgagagcacgccggaccagtgtgtgtcncatacccggcaagtggctaggttggggtctcgggtcttagatgttaggcttggctgcgatgtctatttggtattaggcccaggctatctgcgccccttcatcaactgaataggtgtagcgacagtttgttgcttggacggcggctttagccttactgttgtatggctttgtaaggtcttgtgagaataattaataaaatggccgtatgcatcgcccagatgcagaggccggggtcatcctccttttctaaaaaaaaacctaggcgttacgattttagcatggccatgaatcaaccagaaccatcgacaga

SEQ ID NO: 8940 - DNA, 391 bp, Triticum aestivum
  unsure at all n locations
  Clone ID: LIB104-056-Q1-E1-D2
ccgggtcgacggggaggaagagccacgaggaggagctaggaactgaatatctggtgcagccgcttggccgtgctgaagacgaagagcattccagtgacttcgagccagaagaaaatggtgatggtgctgaggacgaagagattgaggatgacgatgctgaggatggtgaggatcctgtcaaggcgcaatcctcatcaaagaggaagaggtctggtggggaagatgaagatgatgacgacggtgatgatgatggtgatgatgatgagaagcctccatcaaagcgatagtcaatttgttcgtgctgatctgtgatcttctctgcttgggccaagaaggaaaataatcctcatggagaggattgttgggaaatgctgtacctttangacatctg

SEQ ID NO: 8941 - DNA, 226 bp, Triticum aestivum
  Clone ID: LIB104-056-Q1-E1-D3
aaaactggcaagtcctgtatatatagccagagcatccgtcccggttggtggctccaaccgtgactaatgccccctttaattccggttggtgccaccaatccggactaaagggcatgttctgcccgcgtcgcgacacgaaagtttaatcccaactcgctaactgaaggaactccaaaatggtttaaaagccctaatcccgctgccctctcgaactcctttcaaatgc

SEQ ID NO: 8942 - DNA, 365 bp, Triticum aestivum
  Clone ID: LIB104-056-Q1-E1-D4
cggcatgtttatcaagaaagataactcagatggcactgacatcttcgttaataaagtaattacccacagataggtaggtcaccgttaattactggtagtttgataattaccccttcgacagcaaaaactatatttaaatcaaaccttgagcagattttggacacaataaattccttgcagtaatttaacctactaatggtcacacaaactaacgaaccattctaatgaatcataaactatacaaacacatgctatgatttaatggttataacataattataataatataaaattaagtaatagaacatggaaagtgtacaaatcaagtacaccagtttccccataataaacgtactactatgttt

SEQ ID NO: 8943 - DNA, 446 bp, Triticum aestivum
  unsure at all n locations
  Clone ID: LIB104-056-Q1-E1-D6
acgggtcccataaacgctgatgatccacaaaccgcttccgccatcaaccactagaaaccatttgttgtactcacagaccataatggtcttgtactacatatgttgtattttgcatggaatttctgtatcaagttggtgcctcatcagctaacagttatcctggggctgatgagcacaagggccattttctgggaattaacacccggagattcggtcgccacagacttggtatcagagccaggctgaccattggctaattctatcttagccaggtcggataacttaggtaaaccaacctacgagaccctaaccaaaaccccagccaagcttctcgtgcaagatagccacactgtggtcncgacactttttgcagtcggtgcccaacctatcanattagcctgtcgatcacataccagttgacgatggcaaaaatgtctcattcgcaa

SEQ ID NO: 8944 - DNA, 364 bp, Triticum aestivum
  unsure at all n locations
  Clone ID: LIB104-056-Q1-E1-D8
attcgcgggccgacgggggaggcgaaacgcaagaccgcaagttattccagtaccgcgatcccgccgtcgtcgccgccgtctggaatcgcctcgccaccgcctggattcgccctcgaccccgactgcaaacgccgtctgcgtgccgccgcccgccgcgtggggcagatcaaggtgcctcagactcatctttcaacaacatggatggccttagactcccctcaaccattgggaaagcaaagagctacgcatcttcttccttaggagctctgcgaaagaagatgcctcaatctggaagccgatctctacacacaagtcgcccccggtcagctcctgttgcanaccgcccaatggtccccccatcttc

SEQ ID NO: 8945 - DNA, 357 bp, Triticum aestivum
  Clone ID: LIB104-056-Q1-E1-E1
ggagcacaaggaaggcatgatggagaagatcaaggacaagatcagcggcgacggccacggcgacggcaagaaggacggcgagcacaaggagaagaaggacaagaagaagaagaaggacaagaagcacggcgagggccacaaggacgacgacggccacggcagcagcagcagcgacagcgacagcgactgagccagctccggccgcgtgcagtgcaggggagatgaacgcgtgggttaatttggagcgtgtggtagcatatgtatgtaatgcttgacatgtctcatggatcttgtaatgtaataaccggctgcactgcatggtgcttgtaataataacgttaaggaatttccattggt

SEQ ID NO: 8946 - DNA, 135 bp, Triticum aestivum
  Clone ID: LIB104-056-Q1-E1-E11
tcaccatcggttgtactttaccttctctcgagtaccaacctcatgttgcaatgattgactggtgctttttggttccagtgaatgctttgaccttgatgtggcaactggcaaccatgtttcttttgatgtgtgtca

SEQ ID NO: 8947 - DNA, 445 bp, Triticum aestivum
  Clone ID: LIB104-056-Q1-E1-E2
gggtcgacgggagcaaagaacttctcctatggaggggaccatagacctcagtgtcatatcatcatcagataaaataggtgtaggtagtgatctgaatgtatcgtcaaccagcaccaactcagagctaaccactgattcatagaaacgccttgctggatcgaagtcgtctttgaatatttcatcagatgtattcagctcagctgcatctgactgaacaagcattttgaagacatcctctgaagggaaatcaatgatctgtgcttcttctaaaagaactgagcaaggcaaatctgaaaaggtgccatcaggcttgagagggtacaatgctgagtttctctcaagtagaagattatcattgattctcacaagatccatctctactgcagccttaactgttattggtttatctgcttgatagtctgcacatggggcatctttggaaaca

SEQ ID NO: 8948 - DNA, 119 bp, Triticum aestivum
  Clone ID: LIB104-056-Q1-E1-E3
aggggttttcctccaagccgggcaagtccaatgtccatggcaattggaatttttcctccagaaaaatgaatccggggaagaaaaaaaacagattcttccgtttttaacggcgtttaacc

SEQ ID NO: 8949 - DNA, 297 bp, Triticum aestivum
  unsure at all n locations
  Clone ID: LIB104-056-Q1-E1-E4
gtgcccctaagagaccagctgaagtagctggtcgagctccacaaggcggccgaacaggtcatgaagggcctcatagttcggctgtggcctaaggaggccatgcctgggagctactttggcctgntgcggcggctggtggatgcgtgctcgtgggttgaagtcatcaagcactccgcctgtattgaaggtgcccgtcgggcccttgcccgcgcaaaggtgcactggggcaagatggatgcccagaagctcgtgacggacccgccaccagagggcaaggagcattacacgcccgagatg

SEQ ID NO: 8950 - DNA, 401 bp, Triticum aestivum
  Clone ID: LIB104-056-Q1-E1-E5
attcgccggtcgacgggccccaccacccaacaatgctcaatgttcatccagaggcagcatcaaccggcttcagttagcagcagtagcgaaggaatcactcaggctcagttaacagcaagggatcgatcgatcgatcgggttcagtaacgcgtagcctgcagtgcaatcgctcgggttcagtaggcaaacgcctcgctcgggttgtcatatggatgatacgtctccaacgtatctataattttttatgtattcatgccatgtttataatatttctacatgattttggtatgatttgattagaactaacgttgatttcagtagaactatcgtggtgttgtttttgtgcagaaataaaagttctcggaatgcactgaaaatcgacggagattttttctggaaag

SEQ ID NO: 8951 - DNA, 416 bp, Triticum aestivum
  Clone ID: LIB104-056-Q1-E1-E6
acgggcacataaatcctatttgcgacaataagaacatcattaatccttcccataggttttttaatagtggaatccgcaagatgcaaatttaaaagaacaatcatcaaattcacggaaacctaacacatcacataaagtttttcgaatcatggaaacgctagcacccaaatcacacaaagcatggcactcataatctttaatcttaatcttaatagtaggttcccactcatcataaagttttctagggatagaaacttccaattcaagcttttgttcaaaagattgcatcatagcatcaacgatatgtttagtaaaagctttgttttgattataagaatgaggagaattcaacctggattgcaacaatgaaatacaatatattaaagaacaattatcataattaaattccttgaaat

SEQ ID NO: 8952 - DNA, 417 bp, Triticum aestivum
  Clone ID: LIB104-056-Q1-E1-E8
attcgcgggccgacgggcggtactggaaaagatgctcgaactagcaccttgcccggagccctcaaaggaagataaaggggggaataatgaggtcgaaagcagggccccatcgctaccaattccaaccgagggaatgagcgcctccgtgaaggaggataaccaaggggaagaatctgaccttctctcgcttcgaggaatgaagaggactgcctctgaagatccggaaaccaaggcttccaaacaggagaagaagtctccaccagagggttctgccttggagggtgcccttgccgcacaaagtccgcgcaaggatcagccctccaatgagctgtaagtaatcaaaaagtactttaatagtggagatatactaccttacctctgaggaaaataaccgaagcatttatcttgcagtttgga

SEQ ID NO: 8953 - DNA, 401 bp, Triticum aestivum
  Clone ID: LIB104-056-Q1-E1-E9
cttaaaactaatcagtttttgaaaaccacacacacacttgcctcggtaccccacttcgtcatcaagtggtttccatatcattatctccctcgggcataagtgacacccgacggggttttccaaaagttctttgaaaatagtttgtctccttcaccatgcatatacccgtccctttttgcatagcgtctactttagcatcctatctactcccaccggcataaccctcataggaaggtagggtcatgcccaatgcaagtatcaacaaggaagtaacgaaggcaacccaccaaagtggttaccacctcatcatgattccaatgcaacaataataaagtgctatatgacatgtataaaaagggtttcgtaaacatggtcaaaaggggctgcttgcctgttttaac

SEQ ID NO: 8954 - DNA, 439 bp, Triticum aestivum
  unsure at all n locations
  Clone ID: LIB104-056-Q1-E1-F1
gggtcgacggggctatatcaacacacaaagaaggcaagaactgtagtaagtacgtacgtaggtgtagcacctcatcttgtactgcacaccatggcgataatgaagaagaacacgagctccctgagcttcgtcgtggccgccctcatcgtggtcatggctgccacccttctcctctcctcgtgcgacgcccgcaaagagaaggataagcccaccgcttcccccgtgtcggggaagtgcttctcgaggtttttcccaaactgcaccgagcagcgatgcaagaagttctgcgtccagccactccccggagccgtctgcatcgacaaaacccactgttgctgccctattgcttagttataagcgtcgttgaagcgatcgggctaagaaatagtactggttanagatggcaacaagcaatatttgtacacttcgaaatatatac

SEQ ID NO: 8955 - DNA, 399 bp, Triticum aestivum
  unsure at all n locations
  Clone ID: LIB104-056-Q1-E1-F10
ctggcttgttaaaacaggagtgacacctgccgagaagcttctgaatctatacgagacgaagtggcagcgcagcgtggaccctgtgttcgaggagttgttatattgatatatactgatatcatatataacttcggtggacgctggacaaggtggacagggtcttcaaattgtatccccatacaaaatcccgtccccaattctacaagccacctgaccagggaaacctactctccggtctcgtggctgcgaataattttgagctcggaacactctgtttgtggcttgccgcctttcttttttcggctgtgtggaccttttacagcttctgatttttctcgcatctccagggagccggaacanacacctgttttgtacgatccccttttcatcttttcctga

SEQ ID NO: 8956 - DNA, 403 bp, Triticum aestivum
  Clone ID: LIB104-056-Q1-E1-F11
aggggatggacaacttgctccgtccctgatgggccgttcgaacgtgcgaacctggaggaacaccggttctccatgacacgggcaatccgcaactccggatgaagcctgttggctggcattggcatggcacgccgcgcctaataaaacgtgatgccattaaatgccctctgcgttcctccttgggctgcctcatcgacgtaacggcatggctttgtaactttgcattgccctccatgaaataacctgtagatatccgcttgtgtggtccggttgtttgagagatgtggcgcgagagaaacgcggtcttaaatcacaaatttctcgcctatgcagcgagtcatcaatcaggttaaagcccgatgagggtttctagttgaagatggatagcaaaatctggatgttc

SEQ ID NO: 8957 - DNA, 459 bp, Triticum aestivum
  Clone ID: LIB104-056-Q1-E1-F2
ccgggtcgacatgattatgtaattatgaacgggctcatgtactccctagccggattgaaaatcatttatcatgacggaccctttcgcttcagcccccggatctgacagtccggggtgtatccgaatacccacacagttatgaaaacccggggtatgcgtggaaaccatgtgtaggggtcataagtgcttgaacagacaagtacccaactagttaagttatattacatggatagtaagaaacatcttccagatagaatagttccgttaggggttcctttctttgggtacgcatgcatcgatgtgcatgtccgaactgcgaacagaagcgcagaaaacaaaacatctgggtatttttgttgttctgaacgagaacatcttttgttcaccgaccgaatattcccttaagaacgctagctttcggcttcacccagtctgaggtacacatccggctcaaccggc

SEQ ID NO: 8958 - DNA, 398 bp, Triticum aestivum
  Clone ID: LIB104-056-Q1-E1-F3
gggtcgaccgggataaataaacagtgtactacaatgttatagccatataatccgggaataacaatgtactgggaatcaaaaaaaaaaaaaaaaaaaaaaaaaaaaaaacgggcgccccaaattgggacttggcccaactggagagatgaaggacccatcgtatcctcaaagccaaggatgggtcttcccaagcatcggagaattcatctgttatgataagtacctggaagcaaacttcaaagcagcagcggcgaaggctggccaccctgagtgggaattgcctgacgatgctggagagtacaacgacactcccgagaaaacccaattcttcaaggacaacggaacatacctcacagagaaagggaagtttttcctgtcatggtactccaacaaactga

SEQ ID NO: 8959 - DNA, 432 bp, Triticum aestivum
  unsure at all n locations
  Clone ID: LIB104-056-Q1-E1-F4
gtccgtttagtattccttttctgcaatactcaaaaacaaagagaaaacagaaactggcactgggctctaggttaataggttagtcccaaaaatcatataaaatagcatataaaacatcctagatggataatataatagcatggaacaatcaaaaattatagatacgttagagacgtatcaagcatccccaagcttaattcctgcgcgtcctcgagtaggtaaatgataaaaacagaatttttgatgtggaatgctacctaacataattttcaatgtaattttccttattgtggcgtgaatgttcagatctaaaagattcaagataaaagtttaatattgacataaaaataataatacttcaagcatactaaccaagcaattatgtcntatcaaaataacatagccaaagaaagctcatccctacaacatcat

SEQ ID NO: 8960 - DNA, 426 bp, Triticum aestivum
  Clone ID: LIB104-056-Q1-E1-F6
gactgctttctttgacctgtctgagtttaccaattaaagcttacccttcgtgtttcttgccggtcagtgttgtcgtttacaagggttgttatgtctatcctctgctacccgcctccattataaaccctccactagactaactgaaataaaaattattaagcatgatccgtttatcagttgaactgttagaactaataaccaaaccatgctaacatcaattataaaagaaaataatagtggtgatttttgtaccaggaaaaaaattaccttggaggataattttggttgtcaaaaagttgtcttgtcgttcaaccaaccatgaagttatgccaatttaagaggatagaatggaactaacgcaaaatgtactcattagattttgaaaagaacatgatccctttactgtattatttagttaattatata

SEQ ID NO: 8961 - DNA, 436 bp, Triticum aestivum
  unsure at all n locations
  Clone ID: LIB104-056-Q1-E1-F9
acggacacctccagcccgacgagacatgggaccgacaagtggagcgcgttttgacaggcacctgtactatatagaggtgatgatgtgtgtgtttgtgcaccttactgcatatatatatacacgtacaaggaagggcaagacatttttgcttgggaggggagggagcttgcttgtgtgtttgctttgcgtttgttgctgtttatacctagggtcgggtcgggtcggatgttggttcaattgcacatgtttggctggatgaatcgtgcttataaacattctttataccttgtattgtacaagttagtgtcagtcggtcgatcactttcagcggatattggacaatttctgagctttttctccatgtattggcatttcttttctgttttccttctttttctttctttctttctttcctcctgntgtacacgtgctcctc

SEQ ID NO: 8962 - DNA, 408 bp, Triticum aestivum
  Clone ID: LIB104-056-Q1-E1-G10
cgggttctcttacttatacaaatcattcatgaatttcttgtaggatcaaaatggccatggcaaaccttcaaagaatttaatttccaaaaccaaaggtgaaccaatacaaggatgaaggacaaataattcaaatcaagatattcaattcattcaaacaattttctcataggatataagtgaagcacaagagtaaatgacaaactactccaaaaagatataagtgaagatcaagcgagtagttaagtaaaggggtagctaattgaggactctctcttatttaaaaactttcaaatctaagtattttattaaaacagcaagcaaaatgaaaacaaaatgacattccaaggatagcacacatcatgtgaagaagcagaacttaggctcaaccgaggctaaccgataattttt

SEQ ID NO: 8963 - DNA, 386 bp, Triticum aestivum
  Clone ID: LIB104-056-Q1-E1-G12
acgggcaggtgcaccccggagacgcgcccaaccccaactacttcgacccgcgatacctgctgtcaatgtacggcaaccccctgggggacctgctcaagggggcctccctctggacaagggccggcaaggacaaccgcaagggccccgtctccctgctctaccgcgcctccggcctgctcgtccccggcctcgcctcccacagcccgcgcgactacgtcaacgccgtccgcctcggccgtatcgcgcccaagtcactcctctaaaagtctaactcagacccactgtgtgtgtacgaccacaagagagagaattggtgatgaataagttgttgtttcggttgtgtcgtgtcgtgtcgtgtcgtatcgtgtgtgtgctatattaagcct

SEQ ID NO: 8964 - DNA, 240 bp, Triticum aestivum
  Clone ID: LIB104-056-Q1-E1-G2
cccgggtcgacgggcgtacagagtataccggagatcggggtgatatagattgttaggtccgcagtttgccacttggtaatgtccctcccctaaatagcgctgtcatgccatgtgtgccttgctctcagcagggaagttgagttgttgtatgttgtgtagcagaacgatgctttctgcctgtggaagtaaaacataaagattgcctatgtgtcatgactcaaatggtattgtcacctactc

SEQ ID NO: 8965 - DNA, 280 bp, Triticum aestivum
  unsure at all n locations
  Clone ID: LIB104-056-Q1-E1-G4
gaagaagaatcaaccgagaacgtcaaggtcatctacgcccgcgccaaccattaccccaaggattacaatgcccagaacaaggatttggttcaccttaaccttgaggcccggatgaagggtgggttctatgtcagtcctgaggctaagctgctgtttgttgtcagaatcagaggtatcaatgccatgcacccaaagaccaagaagatcttgcagctgttgcgtttgagacagatattcaatggagtgttcctgaangttaacaaggccaccatcaacatgc

SEQ ID NO: 8966 - DNA, 430 bp, Triticum aestivum
  Clone ID: LIB104-056-Q1-E1-G5
aattcgcgggtcgacggggacgaccacccccttggcggccgccttctcagtcttctttgccgggcggggtcttccttccttggtttcctttaatccaccttctgcaggctcgacggcgagcttggcttcgacttcctgtgctaagcctcgcccctcatccgtatcaaccgcgatcgtgacctcctcgtccatggagtcgccgttgtcacgcacctttgcatcaggtgcttgttcctccgcctcggtgaagggcatgtcttgggtgatgtcacggttcttctcctcctttgagcaattgttattgtcatgaacgggtgctgccatgacctgctgaacattcgatcgaaaagtgagacatcaaagtgactaacatccgacatcaaaccaacaatctaccacgtactaagtccaacagcccatgttcatatgc

SEQ ID NO: 8967 - DNA, 454 bp, Triticum aestivum
  unsure at all n locations
  Clone ID: LIB104-056-Q1-E1-G9
tagccgtcaaaaattctagggtcgacgggggaaaagagggagcaaagcaaccgtgagtactcatccaaagtactcgcaagcaaggatctacactacatatgcatgggtatatgtgtaaagaggcaatatcggtggactgaactgcagaatgccagaataatagggggatagctagtcctatcgaagactacgcttctggcagcctccgtcttgcagcatatagaagagagtagattgaagtcctccaagtagcatcgcatagcataatcctacccggcgatccttccctcgttgccctatggaaaagcgatcaccgggttgtctgtggaacttgtctgggtgtgttttattaagtatccggttctagttgtcataaggtcaaggtacaactctgggtcgtccttttaccganggacacaactattcgaatagataaacttccctgcaaaggtgc

SEQ ID NO: 8968 - DNA, 287 bp, Triticum aestivum
  Clone ID: LIB104-056-Q1-E1-H10
catggcgaaagccgggataagatggccaagatggccatagaattaaaagccgccgtttgaccgttgccgggttcttggaaaaggaaaacctaaccaaagcatcggacttgagaaagctgttgcgacgaggaaagacatccgctctgctatgagggcgaagaaggaggagctgcgggaagccggggatatggtagctgggaaatcgtttatgttgcggaggaagttcggagattcacggtatgccactctggatcggctgtggagttcggagaatgtgtatatggatt

SEQ ID NO: 8969 - DNA, 383 bp, Triticum aestivum
  unsure at all n locations
  Clone ID: LIB104-056-Q1-E1-H11
tatcaaatctanaaaaaattttaattcggatagtccaaaccaaaattacccccggaaggccggaaaccaatacaaccaaaattggtgggtttttaaacaatcccggaaaatcaaaccccgacaaaaaggggcccaatccccaagccaaggaaatgacgaaccccaccaacagaacaccggaagtcaaaagactttcccacaagaagtcaaaacagtaaactcacttcatgtgatagtacggaaaaccaacacggcactcgctaagacaagtgtcgcacggtccaccccagcggaacaccgatattggatgtcaaaaccaatcactttcgaccatctggatacaacanacagaccgtcaagtaaaaaaaaaaagcggccgctct

SEQ ID NO: 8970 - DNA, 397 bp, Triticum aestivum
  Clone ID: LIB104-056-Q1-E1-H12
tttagctcggatatgtcaaatccacagtacctccggaaggcctgcaaaccataccaaccaaaattgttgggtttttaaacagtccggcagactcaaggccggacataaggggctcgatgcgccaagcgaggacaatgacgaaccccaccagcagagcaccggcagtcaaaagactttcccacaacaagtcaaaacagtaaactcccttcatgtgaggctatgggaaactaatatggaactcgcatatgagcaagtgtctcattgtctacaccatgggatcatcgatattgcatctaaacatgaacaattttccaacaacgggcatgactgcaatgattttactataaattctcttgaggtccactgtgcgatcaatacgcaaaacctcaaccttggg

SEQ ID NO: 8971 - DNA, 172 bp, Triticum aestivum
  Clone ID: LIB104-056-Q1-E1-H2
gaaccacaagaaagacggcgagcacaataaggacggggagcacaaggagggcatgatggaaaaaatcaaggacaatatcagcggcgacggccacggcgacggcaaaaaggacggcgaccaaaaaaaaaaaaaaccatcaaaaccaaaatttaaaaaaaaaaaccgccccccc

SEQ ID NO: 8972 - DNA, 400 bp, Triticum aestivum
  Clone ID: LIB104-056-Q1-E1-H3
cgggtcgacggcggatcgagaaaaagacgtacgactacttcctctacgttgtgtcaacgcttccgttgcaaccaacaagggtacttaaattatgcccttccccccgttgcaaggcaccacaatgatcttgcttgtgcataggaaattttttgaaattacaactttcccaaacattgtcctgatccagtcaggcagccggaccatcgggttttggccatgagctgggaccactgggaagcggcccgccacgcggaccatgagacccatgccaaggccgtgatcactactttctgggtgagctctcttcagaagcacaagtccattctagtttcatgaatgatttaactcatggcttcttccattcttgtttcatgcatgattgtagaaattctatcgggtt

SEQ ID NO: 8973 - DNA, 288 bp, Triticum aestivum
  Clone ID: LIB104-056-Q1-E1-H4
gacgggccaaaagaagatggaagcggttgcggagggcaaggcccattaaccctgaaataagaaagacggccctgcccctgatgtttggcaggaaaggggcgtgtgttagctgatgtaatgttacaccgtagaatcatcgttcgtgacgataataatgatccgaccataactcctctaatatcattgttctgttgtcattgtgtagtttactctgtatctgaactttgttttactcagcgaaaccgtactgctatgatgaatgttttcaaaaaaaaaaaatttttgggt

SEQ ID NO: 8974 - DNA, 356 bp, Triticum aestivum
  unsure at all n locations
  Clone ID: LIB104-057-Q1-E1-A1
cgggaggaaggaagaaaaaaaatcggtggtggtgggacgaaatttaactggtttaaatgaagagggagaatgccggcagctggaattttggacttgaaaatgagcaaatattagagacctattctgcacaactccaaaagtcctgaaacttcacggagattagttttggaatatattaaaaatactgggcgaagaaagcaccagatggggaccaccagtcagccacgagggtgaagagcacgccctagcccctgggcgcgccccctacctcgtgggccccctggcagtccccgactcccatcttctgctatatggtgtctttttccctgnaaaaaatcatagagaagcttttggga

SEQ ID NO: 8975 - DNA, 447 bp, Triticum aestivum
  Clone ID: LIB104-057-Q1-E1-A10
ccgggccgacgggatgcacaaaattttgcattcagtgcatcccacagaatttttccgtcgtttatgtgcatgtacacatcacacagacggtcagcaagaacactcagaatgcatcccacaaacatagtattggcttcctggaattttctccgatcttcgtcggtcattccctctggagcatcaacactagcgtggaaaactttcagagcagtaagccagagtgttgtcttcacctgccacctcttaaagtgcacaccgataaacttatccggcatcagtgcatcagcgaatccagccatagttaactcaggaaattgcctagaattaggtttttggattgttggaatatcaggcaagttcatgattaattccagtaaataattcatgactagaagagatactagcatgcaataatctagcaaactagaagaccagcaggacatgcat

SEQ ID NO: 8976 - DNA, 411 bp, Triticum aestivum
  Clone ID: LIB104-057-Q1-E1-A11
cgggccgacggatgactcaaacgatagacggcggcttcatccacgctccggtcccttgagtcgagtcgaaagcagtgatgctgtgtctagttctgaaacatcgattgtctcatgttgtaattaaactttaatgaacttgtagtatgtctctttggtttcgagagtcgttcaacttagatgtaatcgatgctattaatgtcttgcttttctcttccgatcgttctgttgcatacttatatattgcttatgtattgtctgtgaattggtactaacgtttcgtttggctactgcatagcgatgccgtggtatgtcgtgtacaagggtaaggctcccggagtctacgacgactgggaggagtgtcggagacaggttcaccgattcagcggtaacaattacaaagggtacgccact

SEQ ID NO: 8977 - DNA, 427 bp, Triticum aestivum
  Clone ID: LIB104-057-Q1-E1-A12
ccgggtcgacgggagcatcgagccgctctggggcggcgtcgtcatcaccgccttcgactgcttcatctttctattcctggagaactatggtgtgagaaaattggaagcgtttttcggcgtcttgattgcaaccatggctatatcatttgcgatcatgtttggtgaaacgaagcctagtggaaaggagcttctgatcggtaattctctgtctgatatgttggcagatgcttttgtttctgatgcactcttgagacgtagaagaatttattcagtatttttcataattaggtttggtggttccaaagctaagctcaaagaccatcaaacaggcggttggaattgtgggctgcatcatcatgccccataatgttttcttgcactcagcgctagtgcagtccaggaagattgacacaaaaaagaaatcccg

SEQ ID NO: 8978 - DNA, 216 bp, Triticum aestivum
  Clone ID: LIB104-057-Q1-E1-A3
acggggaagtggaagacctaaggtttattaatctgtgagaggtgtaggatgaagatggtctctctcaaacgaacctgcaatcaaatacaagaaatctcttgtgtccccaacacacctaatacaatggcaaattgtacaggtgcactagttcggcgaagagatggtgataaaagtgtaatatggatggtagaaatacatttttataatctgaataaa

SEQ ID NO: 8979 - DNA, 322 bp, Triticum aestivum
  Clone ID: LIB104-057-Q1-E1-A4
gggtccacgggccatgataaaataagctcgagcacacatcaaatcctaatcacatccacataagatgcatgacaccaagctaacagggtatttccagagacatgtctgtgatatactcgcacgcaacgtccaggatcgatcattctgtgatatgaacatgcattgccacatagctttgcatgatggtagcatatctatgatgatgtttccagagcttgtccgtttgtgacgtcgctgtgatgcaagttcaatgtccaacgcggtacactgccggaggcattcatataaactcaggtcgttgttcaagtttcgagctgcaata

SEQ ID NO: 8980 - DNA, 379 bp, Triticum aestivum
  Clone ID: LIB104-057-Q1-E1-A5
ggaagcagcagatcgccagcgtggcctacaacggcagccttggacaagccaacaatcccttcgaaacgaacgaccctttcgccatgtccaacagctttgcgcccccttccaacatccggctggcaatggtgacccagcagcagcaatacttccaggctcaacaacatcagcagcaatactactaccagcctcagctccaatactaccagccccagctgcagcagcagcatcagcagcagtatttccaggctcagcagcatcagcaccagtatttccagcagcagccccagtattgtgtgcatccggccggaacttacaatccgtttggtgaccctttcactgaccttgtaactctggctgctccttcaaaacaaggcga

SEQ ID NO: 8981 - DNA, 315 bp, Triticum aestivum
  Clone ID: LIB104-057-Q1-E1-A7
gggtcgacgggggatttaatcttactggtgtatgactatgtaaggtcttgtgtgaataattaataaagtggttgtatgcatagtccagatgcagaggccgggttcctcctttttcaaaaaaaagaaagaataatagacaggcaccagcaaggtcaagtgaaagcatgcatctgcagcaggtgatcagctaagacaactatttgcgtaccaatcaatgtaaaaaatacaacctttaatttgttcattgtagcaatgatacggtgctagtttaaagtaattgtaccagaaaattagacaaaagacatcccaagtttt

SEQ ID NO: 8982 - DNA, 273 bp, Triticum aestivum
  Clone ID: LIB104-057-Q1-E1-B1
gacgggctaacccaacttctggcaacaggagtgctacgtaccattagttagttgagagatgtactatccgaccgaggcattgtatttgtaacctaaagagtacagggggaagtggaacaacgcgcatgatttggcattcgtcggtaagtcattggaaatgctcttatgtgagatactatggaggcctgcttgatgaccaacacaaaagtgatcgcctccaaccttcttctggttgtttgattaacacacaagaaaaattctcattgaaacaaa

SEQ ID NO: 8983 - DNA, 405 bp, Triticum aestivum
  Clone ID: LIB104-057-Q1-E1-B12
ccgggtcgacagtaggcttcatataaatgcaataaatccattagctgatgcgtcctatcattagctcttatcaataattctattaaattttgaagctgacctgtccgcccgttggctttggttgccacaacaacggattgcttgggatactaataggatggcttgggatttgggagtacgattcccaaacgtgttactatcatatttggcttgcagtggttgtgcaggaggaagatgttgcttgattggagtccctcggagcctagcagtgctgctcagccctatgcattccattggtcgcctcggtaggtaattgggatcctcacgctaccaatttggtcatccctaggaaacatcaaggagatgatgagactgcatcttgagaagaagcattatttacaactc

SEQ ID NO: 8984 - DNA, 444 bp, Triticum aestivum
  Clone ID: LIB104-057-Q1-E1-B2
gttgttgtaaggaatacatcacctccaccatgtgacacatcgcccccgagagtggctacatcatctgagttgatcataagaggtaatgacaaaggtactgatcttccatctctacatgagaatgatgaatgccttgtcaatttgaatgcaccatctgatgagctacccactactttgatcacaccacctattttagaggactacgttgataatttgactttgccatgtgatcaaacaactgaaataccaacaattttgagtgcacccattgaattaactattgatgcaaaagaaccaatgtttaatcattttgatatgacctctaatcttggtgatgattctgtgttgaatgacttattgcatgtttgcttatttaagcatgttgtagcatgtaaatttgatgcaagtaaggtttattcaccaatgttgggatggtttaatgat

SEQ ID NO: 8985 - DNA, 438 bp, Triticum aestivum
  Clone ID: LIB104-057-Q1-E1-B3
gggtcgacggggaaattaatatttgctctttagttttccacaatcatccttgctgtacacaccttttgggagaatcccacttgattggaatttattagaatactatatgtgcttcacttatatcttttgagctagatagtttttgctctagtgcttcacttatatcttttagagcacggcggtggcttaattttgtagaaattgctagtctctcatacttcacttatattattttgacagtctcttagaacagcatgctatttgctatggttataaaattggtgctagaatggtaggcatccaagttgggtataataaaaactatcataggaagtgaattggatgctatgatcaatttgatacttgataattgttctgagatatggaggtagtgatattaaagtcatgctagttgggtgattatgaatttaaagaatg

SEQ ID NO: 8986 - DNA, 453 bp, Triticum aestivum
  Clone ID: LIB104-057-Q1-E1-B4
gggtccaggcgcatagtcaacactaagtcactcatacaacaacaaggttggctataaggttggctataagtgtttttttttactcctctccaactctttcctcctactccctccgttccataatataagaatgtttttgacaatggtgtagtgccaaaaacgttcttatgggacacatggagtactagtatttattgcattttccaaggagtgacctcttccaatgaaatggtgtggctaagtttgcttaatttaattagctatagactcaaaattgtcttttcacctaggtacacgcgcttagcactgtttcttccttgggtcaccaaactagtctctctcttcttgattaacttgccacgtcagactttatgcctatgtggcaagcttaagcacctgtaggagcaagtaaaaataagtacaatagtgcgctttacatggcatttttgcata

SEQ ID NO: 8987 - DNA, 377 bp, Triticum aestivum
  Clone ID: LIB104-057-Q1-E1-B6
gggtcgacgggcagtgatgaatgcattcgagttgatctctacctcccagggcctcaatcttggcacactttttgagaagcaaacggattctgttaaacgtgaaacacggtttgcgtcgaggcttccagcaaacgaaatattgtcgaaaattgaagcagcagcaggacccatgggcttcaatgtacagaagcgcaactacaagctcaagttgcaaggagagaatcctggaaggaaaggtcagctggcaattgcaacagaggtttttgaagtgacaccctcactctacatggtggagctccgcaagtcgaatggcgataccctcgaattccacaagtttttaccatagtatctcgaatggcctgaaggacgtcatgtgg

SEQ ID NO: 8988 - DNA, 450 bp, Triticum aestivum
  Clone ID: LIB104-057-Q1-E1-B8
gggtcgacgggtatattgtacggtgggccaggtctgtggtggaggaacacctcctttaacgattcaaaacagggccgtggctcatgccgtcattcccgtcctgatccgtggctcgtttagacctcagtagccgagtaaatggagggatgggttgctgggcagagttctctcctacctccggctcctggttttttctattatcgagtgaggctagatgggcggcggagcttctattcgaaggaaacaaaggctagcgcagaagatggaatttctgatgcaatcgattaaaagaaccaccgtgctggaggacgttaacgatggcaacgtactcatggagccactacactgccagtggtcgcaaccgttgcagacccgctgccgcccatggcggcagtgagtgcggaaggccagatctgtgcggctgatggcatggtcgatactgaaatcgat

SEQ ID NO: 8989 - DNA, 389 bp, Triticum aestivum
  Clone ID: LIB104-057-Q1-E1-B9
gacggaaccagaagtattcgaaagttatagattgctacagactgttctgtttttgacagattctgtttttcgtgtgttgtttgcttattttgatgcatctatggctagtaccggtaggtatgaaccatagagaaggtggaatacagtaggtttaacaccaatataaataaagaatgagttcattacagtaccttatgtggtggtttttctttcttgcactaacggagcttatgagatttcctgttgagttttgtgttgtgaagttttcaagttttgggtaaagatttgatggactatagaataaggagtggaaagagcctaagcttggggatgcccatggcaccccaagatattcaaggataaccaaaagcctaagcttggggaatgcc

SEQ ID NO: 8990 - DNA, 448 bp, Triticum aestivum
  Clone ID: LIB104-057-Q1-E1-C1
gtcgacgggacaacacctatacaaatagtaaaacaaatttggcatcaaatcaatgattacatgccgtgaaataggattaggaatttatggctatttatttatacatatccagatattatggtttgatttttaagcacactcgtctatgtacagaccaatcttgaagaaaataatggcacaaacatatgtaggtcattcaaaatcaattgtcatgccctggctaggaattattagcacaaacactaatcctagtcggattactagcagaaatcatttgcacagatgaaacaactaatcacttatcacctgtaccattcaaacaatcaatacactacacggatctaacaaaacttactcagatttcatggattgggagaacataaccataggatttctattccaaaaaagggaagtacgagtaaccacggaaaccccatgatctatttga

SEQ ID NO: 8991 - DNA, 252 bp, Triticum aestivum
  unsure at all n locations
  Clone ID: LIB104-057-Q1-E1-C10
agtgactcttaacatagcctccccggcaacggtgccagaaaagagcttgatgtctactacacaaccttcatcttgtagacgttgttgggcctacaagtgcacaggtttgtaggacagtaacaaatttccctcaagtggatgacctaaggtttatcaatccgtgggaggcgtatgatgaagatggtctctctcaagcaaccctgcaaccaaataacaaagagtctcttgtgtncccaacacatccaatacgat

SEQ ID NO: 8992 - DNA, 435 bp, Triticum aestivum
  Clone ID: LIB104-057-Q1-E1-C11
cgggccgacggggggatcaatcagtcgcgggcgatgcggatgaatcgggggcctgccgatccactcgacgcggtcgaaccgcctgcgtggaaagggtgagacgcgggcggtaatggccggcgcatcattacgacttctgattttccatatttttacatgggaacaggggagctttggaccttgtgtctagactacaatctaaccatcaatagccagcagcttcatccgcgtaacactgaaggtactcctggaccatgatccatcccttgggaaaacgtttgccgaatcaaaatgtggctcctctgatttgcggcaattagaggccacctcaaggtagtgaaccttctgctgggttggttgaactaccaaaggcgaacggaacaacaattgcacataccctttattttcctggtacaggcaatctccagacatgac

SEQ ID NO: 8993 - DNA, 267 bp, Triticum aestivum
  Clone ID: LIB104-057-Q1-E1-C12
catatatcaatctttacctccgaaccattccggagatcctcgttatgtccgtgatcacatccgggactccgaacaacatttggtgaccaacatacataactcatataatattatatcgtcaacgaacgttaagcgtgcggaccctacgggttccagaactatgtatacatgaccgagacacctcccaatagcggaacctggatgcccacattggctcccacatattctatgaagatctttattggtcgaaccttatgacaacatatg

SEQ ID NO: 8994 - DNA, 451 bp, Triticum aestivum
  unsure at all n locations
  Clone ID: LIB104-057-Q1-E1-C2
gggtccaggcgacactcaaagttaagtatttattagtactctcttcaaaaagggccgaccatgtccaatggctacatcncgtgctctgtcattgagtaaatgcactattcacgtgccatcgaggagaaaaaatattgcgtagtactaggtgccatcgaagtgcacgactcacttacgcattgcatatccccattttcttggcatgacacgccaccttgatgctagatgtcccgcgtgtcatggtggcatatagtatgattttgtaaaatcgaggcatatagatgtcccgcgtgtcggcaaaaggatgaacaaagctcatgtcttaaacgaaagagtggaagaacatagattcccgacggccgagaaagagcaagaaacctcggggtggagcctctgcactcataatattttatattattcagcgatataaaatcaaccaaatctctccacg

SEQ ID NO: 8995 - DNA, 277 bp, Triticum aestivum
  Clone ID: LIB104-057-Q1-E1-C3
agtcgtgatagagttagaagttgtaaatatgcattgttgtatcgcgacgtgaatgaaataaatgaaataatgctcttgttcaaaaatatcataaattagaatgtgaggtagtattaatgtaaagtataaaactgaaaaaataactgtagttcagccgatttaaaggatgtaaggttatttacctttgcatgccacgtaataactcttctaaagtgtcatctaatttcagttcatgggcgttctttttacaggttattaactgggaaacccctggctt

SEQ ID NO: 8996 - DNA, 256 bp, Triticum aestivum
  Clone ID: LIB104-057-Q1-E1-C6
gggttgaactaacgtgagtcgtaatatagttttgcttgctgtttgaatataatagcaagatcttaaagtattagatgttagagagtcttcacatagttgcataattattcgaaactcattgatgctcacttatatctgttcggagtatttagttatctgctccactgcgtgacttacaactttctagctcacggtggcggttttattttgaatgatctacatatctcgcgtgattaacttatgatattgtgagagt

SEQ ID NO: 8997 - DNA, 78 bp, Triticum aestivum
  Clone ID: LIB104-057-Q1-E1-C7
taggcttatgagtcgcgaggtcttgtgtgcaatggcagaagccgccgtggaccgctccaatgggcagctccaagtgtt

SEQ ID NO: 8998 - DNA, 434 bp, Triticum aestivum
  unsure at all n locations
  Clone ID: LIB104-057-Q1-E1-D1
agcaccaagatgacttgcgagggaagangaaaaagatcccaatgtcttgtttgcaagggaaaaacccgccttggacggcccaatggggcaccccaaggggttgcaaggaaccgattttgtactgatcagcttctcaagtaaatagcagaaagatcaccctcccttaagagcctcagccttgactattgcaatgtcaccaacgaagcattcactgagctgataatcaagcttcctctgctcgaagaacttctcatttccctatgtccatttgttgatggtgacgcatatgaggtcaccagcagagcatgtgcgcagctgaagcgtctcatgttgccgcaagggtcgtatgggggtataagagatggggcacttggnatcgagatgatgcacgagctgcgataccttactctcgtcaatagtaatatcacgacaga

SEQ ID NO: 8999 - DNA, 418 bp, Triticum aestivum
  Clone ID: LIB104-057-Q1-E1-D10
tggaaaatcaaagcagaagtcaaaaaggatggtagagagtgacagtgaaactggaaatgcgagtgatggcagctctgaggatgccagaagaaagcggcaacgccatggaaggaaatctaaggccacatctcaaatttctgctgaagatcacacagcagtagctgctctgaaggatgccacttcaactcaggaaaagattggaacaccaaggagtctggcacaagaagacaaatctccactggagaatggcgagatgcgcacaaatggtgttactgactccaaatctgaaaggaaggccggtatcatgcctgttctaactggcaaccgaagcaaatctaggagccagagcacgagtgctaatcactccatgagcaagagcatgagtgtaagtcccagaagcccaatcaaaaggtcaaac

SEQ ID NO: 9000 - DNA, 425 bp, Triticum aestivum
  Clone ID: LIB104-057-Q1-E1-D11
gggacacacgaaattcactctcattagttgcagctcgttgtaactatagtccttcaataccttggcacgcatcgtctccatatatttgattactcgagccgctgcaatgtccactgcatcttctgtagaattgtatgaatagccagacaatgacattgcttcataatcacgtcgctgatgttgtgtgctcggacgaacctttaatgtgactgctaatctttccccaactttgtagcagaagaacatcagtggtgggagctgcaacttaatgaacattacatcaagcatgaacttgtctgtaatgtcaacgacccccatgccagtttctgtcgatatagagaacgtgccaatgtctgaaaatggttgtagttgcactcatgcactgcaaagcatatgtaagtggcagaaatgatgaattagtaact

SEQ ID NO: 9001 - DNA, 433 bp, Triticum aestivum
  unsure at all n locations
  Clone ID: LIB104-057-Q1-E1-D12
ccgggccgacgggtaggtttattagcacaatatatcagatgaatgtcttttctagggctagaggaggtaatgttaattggtttgcttgggaagtgcctatattaattggtagtcaaagttaaccggcatttagtaaagcaatgttgtaggactgggaaattttctttgatctaatgtgctaaagccagttcgggtttgtgctaaacttttgattattctttcagtgaaatgctgaacttttgatggtaaatgttttgtaattggtcaagcacataagaaggcaaactcaagtaatgctatttgattattttgtgaaactttgcagctaggccaactggccaagccatagacaaagaagtgcaagtatatcaggagatctangangacatacctctcgactttcttcagcacaattacccacgagagagaaaaa

SEQ ID NO: 9002 - DNA, 431 bp, Triticum aestivum
  Clone ID: LIB104-057-Q1-E1-D2
gggtccacggcaaggtgtgatccgaggtgttcttctacctggccgaaaacaatgttctttttgagggcatccttctgaagcccagcatggttacccctggtgctgagcacaaggagaaggcttctccagaagccattgcgaagaacaccctcacaatgctgaggaggagagtaccacctgctgtccctggaatcatgttcctttctggcgggcagtccgaactggaggcgacgatgaacctgaacgcgatgaaccagtccgccaacccgtggcacgtgtccttctcgtacgcccgggccctccagaactcggtgctgaagacatggcaggggcagcccgagaacatcgaggcggcgcagaaggccctgctggtccgcgccaaggccaactcgttggcgcagctcggcagctacacgggcgagggcgagagc

SEQ ID NO: 9003 - DNA, 454 bp, Triticum aestivum
  Clone ID: LIB104-057-Q1-E1-D3
gggtccacgacattgtcatactggggagcgtatttctacacaatatgttcccctttgagaggttcatgggagtcctaaagaaatatgtccttaaccacgctaggccagaaggaagcatctccatgggccatcaaacagaggatgttatcgggttttgtgttgacttcattcctggccttaacaagattggtctcccaaaatcgcggtatgaggggagactgactggaaaaggcactcttggaagagactcaataatatgcagggactgatattctcggtctcaagcacactacatagttctacagaactctaccttggtgaccccgtatgtcaatgaacacaagaacagtctgcgctccaaacacccggagcaatgcgacgactggattacatgtgaacacatcaggactttcagcagttggttggaaacacgtctcagaggtgacaacactgt

SEQ ID NO: 9004 - DNA, 405 bp, Triticum aestivum
  unsure at all n locations
  Clone ID: LIB104-057-Q1-E1-D4
gggtccagncgggcattttagtcagttgcaaagcttgctctagagcatgagcttgttaaggcaccaacttcaaacaatttcaaattccggtccccaaaacgaacaaaaaaggcggttttcaagccaaccaataactgtccttggccctccaaaatttgcccaacgggtgtggtaataatctttttaagttgatcctggcattccttttgagtttacaatgtacactagggtggctatgcagccactcaattcactttttgtaaccctgtaagatagttagcaactatggtttcggttcatggagtaccgatgagcagcccgccctgtttcttgagtcggcaataagagtgcacaatggtactactgatacaatttgggatatatatggcctaagcctcgattata

SEQ ID NO: 9005 - DNA, 269 bp, Triticum aestivum
  Clone ID: LIB104-057-Q1-E1-D6
gacggggaaacctaagtacaacatcaatatggctaacctagacgactaggttccccatccaggttcaagtcctaaacttgacatgggtgctctcgtagaaggtgtgtgcgcgtgttgtgagcgtctgcgtctgcattgtgtttctaaagaaaaaaaaaaaaaaaaaaaaaaaaagaaaaaaaaaaaaaaaaaaaaaaaaaaaaaaaaaaaaaaaaaaataaaaaaaaaaaaaaataaaataaaaaacaaaaaaaaacttaaacacaaaa

SEQ ID NO: 9006 - DNA, 428 bp, Triticum aestivum
  unsure at all n locations
  Clone ID: LIB104-057-Q1-E1-D7
gtcgacggggatatgcaacgcggctactttgggccctgcggcaccatcgtctccgtcaaggtgataaatgatcagagaatcaggggcaagtgttatgggtttgttacttacactcaacatagggctgctcagcgtgctatcttggagatggatggcaagcaaataggtaatcgtgctgtgagagtaaatgaagtgcgtacaagaggcaacacccgtgattttgggcgtgatggcttccgacgagatcctgtaagagatggaagggatgtatactgggaccgaagggatanggagaggagttatgatcgccaccgggatagagattcctaccatgacagggatagtgatagacctcgtgaccatgatagagacagatatgatgaacgtgggggatttgaccatgacatggactattccatggatcgaga

SEQ ID NO: 9007 - DNA, 420 bp, Triticum aestivum
  Clone ID: LIB104-057-Q1-E1-D8
gtgcatcgcatgatggcagagatcgacaccgacggtgacggcttcatcgacttcagcgagttcatctccttctgcaacgccaacccggggctcatgaaggacgtcgccaaggtcttctgaatcagttcatttcacctcagccgtccgttccaggagccgatccatctacgtacggcttcgtatatcaatttcatgcaactacctactccggtcccgatccagcctcagcttcacctgaggccggccctaaatttgtttgatcaattcttttgctactagtagtaactagtgatgatcactgttgcatcatttatttatttattttatatatcatcacaagtttcctgtgattcttttctttctatacctttttgtcgatcgtcggctccagctcgatcaaacgatccatgctgctaattg

SEQ ID NO: 9008 - DNA, 432 bp, Triticum aestivum
  Clone ID: LIB104-057-Q1-E1-E1
tgttgtgcaaggactctggatcgaagcctgcctttgtcggtagttttttttgtcgcccaacaggaaacaacaagcaacatgtaggtgggccggcccaggcggaggactgcctttgcgaagccccgccattctgccacataggagatgcccacgagtgctcctagtcggcgccttatctggcgcccactagcctgcaggaatgggttggcccatttgcattgggtttgtgagtcaacagatgaccagtcaaccattgacttttgaaaaatatgttttttaattctaaaacaacaaagaaactatgattttaaaaatgttcacaagcttcaaaaaagtttacgaatttgaaaaaaaagtccatcaggtttgggaaaattttatcgaattttcaaaaacgtacttcaattttgaaacaaaagttcacaaactaaa

SEQ ID NO: 9009 - DNA, 432 bp, Triticum aestivum
  unsure at all n locations
  Clone ID: LIB104-057-Q1-E1-E11
cgggccgacgggagagttcatagtttttttgtgtaggtgcgtgggacttttcaggagcctcctactggattgataccttggttctcaaaaactgagggaaatacttacgctactattgctgcatcatcctttcctcttcaaggaaaaccaacgcaagctcaagatgttgcaagaaggatttatggcaccgttgtctgggaggtctttgctcaagtcaagacataccaagtacccatcacaaactcatctccctcgcatttacattatttgccatttgcctctcgtttctctgtcccccacttcacccttgccgttttattcgccctctctttcccgttcgtccttttgtttgctagtgttgccatgtgccttctatatgattgcatctttgcttgctgaaaatctattgaaatggattcacttanagtgttc

SEQ ID NO: 9010 - DNA, 444 bp, Triticum aestivum
  Clone ID: LIB104-057-Q1-E1-E2
gggtccaggcgaaagcagcacttgaggttattcttcgcaggctcctatctttcctcaagccagataccttccagggtgctgtcaaggcaatgaacgaaagaattctctcggtccttgatgcgtctggctctggccgcgttgatcttgggatgttctttgctatcattgctccaatctgttctggtcctgtggataggcgcaagcgtgtcgtcttcgatgcactcctttggcgtcctgcaagcgaaggtggcaggggccagatcaggaggagtgacgcgctaagttacattaaacttctccgtgccgtttacataccaacccatggggctagcgacatgcttgaaatgcatggggagtctgaccctaccatggtatcgtacacagagttccttgagatgttcaatgatcctgattggggttttggaattctaaccacactggtga

SEQ ID NO: 9011 - DNA, 133 bp, Triticum aestivum
  Clone ID: LIB104-057-Q1-E1-E7
gtgagtcgtattaagtgatgcaacgtgccgtttcgcccaagtcctgtactcggtgcgacgatccgtccctttacgttctgtctgtcttgctggacccatagattgtgtgaccgcgatcacgtggcgtgctggc

SEQ ID NO: 9012 - DNA, 328 bp, Triticum aestivum
  Clone ID: LIB104-057-Q1-E1-E8
tgagtcgtattaaccacgcaactttcgtcggtaccttaaacccaccatgtaccttcctcaaaacagccaccatacctatctagcatggcatttccatagccattccaagatatattgccatgcaattttccaccgttccatttattatgacacgcttcatcattgtcatattgcgtgcatgatcatgtacttgacattgtatttgtggcaaagccaccattcataattctttcatacttgtcactcatgagtcattgcatatcccggtacaccgtcggaggcattcatatagagtcatatcttgttctagtatcgagttgtaatattg

SEQ ID NO: 9013 - DNA, 437 bp, Triticum aestivum
  unsure at all n locations
  Clone ID: LIB104-057-Q1-E1-F1
atcaattgactagaagctagacccatggaggcaataagcgcaaccatcacccggttttggaaattggtaaacaaaaccggcttgcggccaacaaccaaggaacttctcaagttcttccttaaggcctcaaaggcaaaaggcctcttggacaacaactttgtctcccttatttgacgaaggtcctcgtcggcttcctcgacaagttcaacgtcatcaagaagctcccgaacgaccttgacgtacgcctctagcccatgcgcccatgctctgtgatgcctgccaccctcaacggcctctatggtgacaacctcttcgacgcactggtggccctgcgattgcccgtcgtcgcgccggagaatgtcaacctcgangtcgcgctcaacgcgcagcgcctggcgcagcaagacacaatcgacataatcacccacatctacgcg

SEQ ID NO: 9014 - DNA, 425 bp, Triticum aestivum
  Clone ID: LIB104-057-Q1-E1-F10
cgggtcgacgggaaattaacaacagcaccagtattggttgtgccagacatacacaaaagttttgaagtgtattgtgacgcatcccggaaggtcctcggatgcgtattaatgcaagaaggcaaagtagtcgcatacgcttccagccaactacgaaagcatgaagaaaattatcctactgatgacttggagttggcagcagtcattcatgcactcaaagagtggaggaactttttgctcggaaattggtgtgaaatatatacggaccataaaagcctcaaatatattttcacataaccagaactcaatttacgacaatggcgctagttggaattagtgaaagattatgatgttgacattcactaccatccaggaaaggcgaatgtagtggcagatgctcttagtcgaaaccccagctcgggcaacga

SEQ ID NO: 9015 - DNA, 425 bp, Triticum aestivum
  Clone ID: LIB104-057-Q1-E1-F11
tcgcgggtcgacggcgtccagcatccacagtcggaggcggagttccacatcgactccagcgacgactccgacgaccactccagcgacgactccgacgacgacggataactagttagtcatctatacccatttatgtgtcaaatagatcatagggtttctctggttactcctgcctccccctttttgggatataaatcctatggttatgttctcctaatccatgaaatctgagtaagtttcgctagatccgtgtagtgtattgactgtttgaatggtataggtgataagtgattagttgtttcatctgtgcaaatcatttctgctagtaatccgactagggttagtgttcgtgctaataattcctagccagggcttgacaattgattttcaatgacctacatatgtttgtgccattattttcttca

SEQ ID NO: 9016 - DNA, 379 bp, Triticum aestivum
  Clone ID: LIB104-057-Q1-E1-F12
cgggccgacaaatggacacagccacagaaattgctgcttcaaagggcgatgtccgcttggcaatcctgctaagccaggcaggtggatcgatgttaaatcgctcggatgttgctcagcagctggatctgtggaaaataaatggtctggacttcgattatattgaggaagacaggttaaagatatacgagttgcttgctggtaacatacaaggcgctttacttgattcaccaatcgactggaaaaggtaccttggtttaatcatgtggtatcagttgtcaccagatacatcacttgatattatcattcggtgttatcaccaactacttggtgagggcaaagttccaaatcctgttcctgtatacatcgatgaaggacctct

SEQ ID NO: 9017 - DNA, 272 bp, Triticum aestivum
  Clone ID: LIB104-057-Q1-E1-F2
tgggagaaagcaaacccaaagacgtcgtcctgatgacgatcctccattgtagaataccttcctggtttcttttttcctgtatgtatgatgttgatgatgtaaaggctgattggtttgcagccaatttttggcatgccaattgttggcaagcctatttttggcaaagctggaagttgccaacatttggcatgtttggctatcaattggttggttgccagtttttcgccaatatttagcaaaaaaaacatgtgtctatcaattggtttgttacc

SEQ ID NO: 9018 - DNA, 458 bp, Triticum aestivum
  Clone ID: LIB104-057-Q1-E1-F4
gggtccaggcgcataaatgagctcatttcatgcgatcgaacacgacgccccggccggccggccatcgatcgtgtcgtcactcccggccgtaacacggcgaggaacgactccggcgaccggtcatttgcaagtttccgctcgctcgtaccgccgacgtgcagcggacagggaggactcatgaagctgaagggtttggattagtgttcatgctactactccacaatgagcttccccatgagaagccaatgatccctattgaagcatctaaacgatttttgtctagctatgcgaaatcattactcatgatcagtcagtgcccgtatggagatatcatcaaggggaagctacaaaaatatattggaagaggtagtattgcatactccctccttccatctatatagggcctaatacatttttcgaagctaattttgaccaaatgttagagcaataatatatga

SEQ ID NO: 9019 - DNA, 445 bp, Triticum aestivum
  unsure at all n locations
  Clone ID: LIB104-057-Q1-E1-G1
ggtagaaagacanatttaaccctgacggagggagagaaatcatgaaatggccgtgtgggaatccgaaggccaaacgggaatgagaaaaggaagtgtgttggaaaaaattcccaattcaatcacagtatcactaatccaacggatcgtgggacgtgcatcgcttgaacataagtcaatatctacttcgtatcagggtcaaaggtacaatatcgattcaacgctgtaaagatccgacactcacatatcacattttcctatttaaataaaccttttcagttgtgcatgccaaagttacagtgatgtttcttcaaacaaccaatgtagctatcatgcacatgcaccactgttactcttgcattcaaattcattagtcttggatgatttaagtttctattttgaagtaatatatgtaatattcatatatgaattcaacgggtatgcaatt

SEQ ID NO: 9020 - DNA, 385 bp, Triticum aestivum
  Clone ID: LIB104-057-Q1-E1-G10
tcgtaaaatgcgatgaaacttcctctctgatttttttctccgtgagacggaatatatggagttggagttgaggtcggcggagcctcaggggggccacgagacagggggcgcgcccaggggggtaggtgcgcccccaccctcgtggactgggtgtgggccccctattattgattatttcgccagtatttttatattttccaaaaagtgcctccgtggattttcaggtcattccgagaacttttgttttctacacataaaacaacatcatggcagttctgctgaaaacagcgtcagtccgggttagtttcattcaaatcatgctagttagagtccaaaacaagggcaaaagtgtttggaaaagtagataccttggagatgtttcact

SEQ ID NO: 9021 - DNA, 358 bp, Triticum aestivum
  Clone ID: LIB104-057-Q1-E1-G12
acggagaagatgagggtagcgatgaggaaaatgaggacgatgacgagtaaatagtgtatcagatcatgaggtagcaaattgggtgttgggtccccgcttagtgtactagtttgctatcctgctatcctcagtgctagatgatgagatttggtagtagatgttgtgtttgtgtgttaagggggcccttttagacttgtggactcatggtttgagaagttgtttagtagtgtattagcagagaggaagcagagaatgctaccagctgttccaatgcttttctcttgctaaccacctgtgtaagaacttgttttcattcgctaatctgatgactgcccagccattggctcttggttaaaaa

SEQ ID NO: 9022 - DNA, 344 bp, Triticum aestivum
  Clone ID: LIB104-057-Q1-E1-G2
ttgaaaagctgattggcaggatattgaagtggctaaagcccggtggcaaatttcaacagggagtcccggctccacaagtccggggattcaagaggaaagtgaacccgacgcactaccgggagccaaggttttacaccaaggtgtttaaggaatgccactcctatgaccaagatgggaattcctttgagctttctctggtaacttccaagtgcattggagcttatgtgaagagcaagaagaaccagaaccagatatgttggctatgggagaaggtcaagtgcacagaagacaaaggctttcagagattcctggacaatgtgcagtacaaatccactggaatcctg

SEQ ID NO: 9023 - DNA, 158 bp, Triticum aestivum
  Clone ID: LIB104-057-Q1-E1-G3
ggttgggcttaattattcacttttatattatttttggaacaaacctaattaaccggaggccaacccaaaaattgcggtttttggccaattcaattgttccggataattaaaaggtcaaagggattcaaaatggaataaaatcttcggtaacttaattt

SEQ ID NO: 9024 - DNA, 55 bp, Triticum aestivum
  Clone ID: LIB104-057-Q1-E1-G4
gggtccacggcgaagggagattggatggatccagcgctcggtgacacaggacagt

SEQ ID NO: 9025 - DNA, 149 bp, Triticum aestivum
  Clone ID: LIB104-057-Q1-E1-G8
catcatcatcatcatcatcatctcctttcttgtgctaagctgctaacaagatcgatgggtacatagcatggcttgcgcatgaatccatccacggtcacccttcgtgcccattccccctcaaatgatacgggatcgcactggagatgtgt

SEQ ID NO: 9026 - DNA, 448 bp, Triticum aestivum
  unsure at all n locations
  Clone ID: LIB104-057-Q1-E1-H1
ggggccacgcgatgagtagaagcgaaccgccatagtattgaaggacatgcggggacgagtangagcgaactgctagcgtgtgaacggcggggtagtggctttccattatcccatgatacgggcttccgaaagcccttggatctgagatcgaacggttgcatcgcgtgattctagacctatgggtgaatatcctatcctggggggttattctgcaaattttcaacaacttagcatgcgaccgtttgatctcagatccaagggctgccagcagcccgtatcatggtcgcgcctaccacgaccgtcgcgtcgctcgcgcggtcgcgcccttggagatttaacacggtgcgttaggctatctaatgttggcatgtcatacatagtcatcacttagtcactcatactacaacaaggttagctataacgttggctaaaagtgtgtttatttttt

SEQ ID NO: 9027 - DNA, 391 bp, Triticum aestivum
  Clone ID: LIB104-057-Q1-E1-H11
cagattagtcattacgactctgcctcttttgcgatacctgaccattgcaaccaaaactatgcgcatattgtccatgccagcgaatttatcgccagactgaccgttgcctctacagcaaataatgataggcatgaatctttacataattgcgatcccgatcatttgactgccctatcccttgctgaacatgatgctctctactcttgtggccatgatgccaatatttttgaacaccaatttgctatacttccttatgttacacatgagatcattgctattgcactcatacttgacagttccttcgacgaggatcatgactgcaatgattttaccataaattcccttgatgtcaattgtgcctataatatgcaaaaccttaaccttggggatg

SEQ ID NO: 9028 - DNA, 331 bp, Triticum aestivum
  Clone ID: LIB104-057-Q1-E1-H2
tcgacgggtcaatctacaatacttacctctatttaattgattcggcatgtgatttgtttcagacccactactgcagcctcctaattgaacttcagccagtgtgtatcacatattaatcgtacatgggaacttctgccactgtgtcacaaatccatcgcccattcgaacttcggcttacctcacaacgacgatgacgagctcatgtacatttttcacagaagaggtcgagtaacaaatgttcatatatataccgtgggattgggagtcgaaaatgttggtacgctgtcgggcacgtatcttcttctctggttctgctggttcccttgactgc

SEQ ID NO: 9029 - DNA, 410 bp, Triticum aestivum
  Clone ID: LIB104-057-Q1-E1-H5
ttcgccggtcgacgggaggatcgactacagcgagttcgtggcgatgatgaggaaaggggcccccgagggggccaaccccaagaagcggcgcgacgtcgtgctataggggacggcggcttggtcgaggaagccggcggtcgatccgcaacagaacagcaagcgatcgagcgtgcgtgcgaggcagctcgcgacgacgacgatgacgagctcatgtacatttttcacagaagaggtcgagtagcaaatgttcatatatataccgtgggattgggagtcgaaaatgttggtacgctgtcgggcacgtatcttcttctctggttctgctggttcccttgactgccaggggaattagtttagtatgtactgtatacatcagttgagtaagttggacaaaaaaaaacagaccaaaa

SEQ ID NO: 9030 - DNA, 205 bp, Triticum aestivum
  Clone ID: LIB104-057-Q1-E1-H7
ggtctatttacatacttctttctatttatttatttcgaccggtgacctgtttcagatcaactagtgcagcctcctaaatttacttctgccattgatgtatcatatattaatcgtaattgggaacttttgccactgtgtatcagatccatggcccattcctacttctccttgcctcaccatctctatgcccgcttatttccatttt

SEQ ID NO: 9031 - DNA, 356 bp, Triticum aestivum
  Clone ID: LIB104-058-Q1-E1-A2
ggtctagaaatcccgggccgacggggagctaaatccggtacatggggtcgctcaccacgccgccctgcacggagaaggtgatgtggaacattctgggcaagggcagggagctgagccaggagcagttacaactcatcaccgcgctgctgcctcaccaggacaataggccgccgcatccgctcaatggccgccaagtcgccttctacaagccgccaaacaccatcatctccatccaatccctagtactccctccctaaacgattatgaaagcttacatttgtttacagagggagtacaataagcaggacatagtacatactccctcctcggttccacagtataagaacgtttttgac

SEQ ID NO: 9032 - DNA, 221 bp, Triticum aestivum
  Clone ID: LIB104-058-Q1-E1-A3
gggccgaccgggcctctactacgagagcccgaccaagacgggggagatcgtggcggtgtaccagccgagccacgaggagaagcaggagtacgcgtccaacgagcacaaccagaaggcgctggccgagatctacctcctcagctactgcgacaagatcgccatgagcgcctggtccaccttcgggtacgtcgcctacggcttcgccggcgtcaagccgtgga

SEQ ID NO: 9033 - DNA, 398 bp, Triticum aestivum
  Clone ID: LIB104-058-Q1-E1-A5
aagtcccgggccgacgggggcggaaaccaaaaccatcgcactatataagatgcaataataaaagtaagaaaataatacaagtatctatgtaaacatacaagttagaatatttttcctttcagaaagaagataaaacaagaggctcaccacgggtggtgccggcgatgagctcggcgcgggtgatcgacggcggtgaagacggggatggggtgtgacggaccactaaacctagacaaatattatggaaaatggagcttgggggtcaagcttggaaaggagaaagcttaagtagtgtggctcgggcattccatcgaacacgttgtgtgcataggaggtgagctagagcaccaccaagccctctcccccttggcgagagaaaaacagagcactggggtgct

SEQ ID NO: 9034 - DNA, 332 bp, Triticum aestivum
  Clone ID: LIB104-058-Q1-E1-C7
ctggttttctgcagtcgacgattatgaatgttgatcgattctgtacctgatggaacatggccatctgtatatataacaaagtgtacataactgccggttcagggatgggcaattgcacagctctagtagatcaaaacacacacacaacctaccacatcatcccaacccaccaccctccacaccccccaccccaaatgtccaccaacgccccacccacacccaaaccttcaccaccccacacccaacaaaacaaaaaacgcggccccccaaaaggttccaaccttaattccccgttgcaggaaacttcaaacccccccaaaacagtcccccaa

SEQ ID NO: 9035 - DNA, 273 bp, Triticum aestivum
  Clone ID: LIB104-058-Q1-E1-D3
cgggtcgacgggcaatggaggatgtacgtgtgatatgtcaagtagtggacagataagccaaccactggatgtggttttgagggatttttgcagtggggtttgtaaggtgctatgccgcgctgggtttgggatttgaaataaaacgaagggagatgtgccacgctcttaaatgccaaaaaaaaaataaaaaaaagccaaatcaaaaatcaatacaaggaatttaacaacttatctatgcaaatttacaccccgcaattcaatcaatctaaatct

SEQ ID NO: 9036 - DNA, 357 bp, Triticum aestivum
  Clone ID: LIB104-058-Q1-E1-E10
atgactcatgacgacatagcgcatggtttcatgtcacggactatgtctcgcattgttccgaagttcacgcgacctatatcagacacaatccatgggatgtgagcatccggtgatagattgctcatgagagagtcatgcttgagacttggtgtcttgatatactggagagcattgcatgcattgcttgtgagttttatttgaaggttatatttaaagctgtactgatggatctccttggtgagccacctattgtacagtgccatgtctatgacaagctatgcatcacaggcaatctagtcaaaatgctgtcgattctatttgacgtttgttactgaatgaatacctgatacaaacggt

SEQ ID NO: 9037 - DNA, 237 bp, Triticum aestivum
  Clone ID: LIB104-058-Q1-E1-E2
cgggtcgacggggagtcccaaattccgaatcaagagatttgttgtggaatttgtcaattgagtaaagtaataatattaagaactagatcatctaaccccattgaatgaaaaaatgaaattcgattttcaaggaaatttttgaataagagataaataaacaattgaattgaaaaaaaaaaacttctttccattttggaaaatttccttttcaataagaccctctttttggagtgaacg

SEQ ID NO: 9038 - DNA, 241 bp, Triticum aestivum
  Clone ID: LIB104-058-Q1-E1-E9
gacggggtatgacagataatatcgatataggttattctacaagattactctatagatccatcagctctaagtaaactgcgtataaatcatgtatgtagaaggtatgtgttactgatgttagaaattgattccttgtgtgagggtgcggatgtaacacaacatgtaattcttaatatccacatgcctcaccaaaacaatgtacggctaacccacaattatgacgttatcaagctcattacaa

SEQ ID NO: 9039 - DNA, 439 bp, Triticum aestivum
  Clone ID: LIB104-058-Q1-E1-F4
cccgggccgacggggaatacaatgaggagggctcagtaacttctgacgtggttgtccagttgtgcaaagatgtgcagagaaggtctcaggcgggtggtttcattgactttggccgctttaccaatcatcgctcttttgagaccggttcaaagccgattgactacatccagagatttcacaatggtgatttagcgaaatgtgaaactacgtttgaagagatgggccgtactgcacaggtcaacattatgtgtggacgatgctcaaataaagtatgcaaagatgaacatggatgcatttgcggcgtatcctatgatgaaaggatgtgcaggacggttgttgagctagccattccttgtcctaaaagaggtccaagagtttttacgggtttcactcgtgggcttcacccccggtcagcacaagtggtttacaatggattgac

SEQ ID NO: 9040 - DNA, 419 bp, Triticum aestivum
  Clone ID: LIB104-058-Q1-E1-G1
cgggccgacgggcatcacacttaaaaacgatattatgaattttaaacaatttgatcatgagcatgttgcccaatcttgggaaagaatgaaattgatgcttcgcaattgccctactcatggtttgaatttatggatgatcatacaaaatgtttatgcccgtttgaactttgcttctagaaatctcttagatttggccgccgggggcacgtttatggaaatcactttaggagatgctataaaacttcttgataatattatggctaattattctcaatggcataccgaaagatcttctagtaaaaaagtgcatgctatagaagaaatcaatgttttgagtggaaagatggatgaacttatgaaattgtttgctactaaaaacactccttttgatcctaatgatatgcctttggcctccttga

SEQ ID NO: 9041 - DNA, 356 bp, Triticum aestivum
  Clone ID: LIB104-058-Q1-E1-G4
cgggccgaccggcaggataaacacatgtatacacgatgattgtccgtgacatcactgaaaacacgacttttaaaggccacacacaggacatcctatggcaacaacttcacagttaggttcatgacgtaagacaattgcagcattttgaacgacaaccttggttaaacattcgcaagtgttacaaacaggcagttagcgcacgaatgtctaaggaattacgcaaccctaatcgcaacttcaatgtgatctgcaaccgcacaatcattccaattggtcagctaggtaagctcagtatcaggttcatgcttgtagcctcgaatacttcgcaacccagctcattctgtccaaccattcac

SEQ ID NO: 9042 - DNA, 437 bp, Triticum aestivum
  Clone ID: LIB104-058-Q1-E1-G8
tcccgggccgacgggagctcggaggccgggagctacgagtacgacgaggatgccgaggaggactacgaggaggagctcgagaaccacctccgcgtccaccaccacgagcacccaggcggtggcgaggttgatggggacgatgatctcgaggctgatggcgagggcgagggtgagggtgagggcgaggatgaaggcgaggatgacggttctgaagagagcgagtacgaggaggaggggtttgatgaggacgaggaggtggaggatgtggatctagacccggcagagtacgaggacgacgaggcttatgcacgggcgcttcaggacgctgaggagcgtgaggttgccgcgcggcttatggctctcgctgggatcagcgattggcgggccgtggaacatgttgaggattacatacacgacgcccaggattcatggcaaga

SEQ ID NO: 9043 - DNA, 445 bp, Triticum aestivum
  Clone ID: LIB104-058-Q1-E1-H10
cgggtcgacgggggcagatcaactatgaggagctcaaggctgggctggagagggtgggcgccaacatgaaggagtcggagatatctcagctcatgcaggctgccgatattgacaacagtggtaccatagactatggagagttcatagctgccactctacacttgaacaaagttgatagggaagaccatctatatgccgccttccaatactttgacaaggatggtagtggatacatcacggctgacgagctccaacaggcatgcgacgagtttgggattgaggatgttcgacttgaggacatgataggcgaagtagatcaggataatgatggacgcatagattacaatgagtttgtggccatgatgcaaaaatcgaccgcaggctttgggaagaaaggccatcagtataacgttagtgtcggtcttagggatgccttgaacataaa

SEQ ID NO: 9044 - DNA, 441 bp, Triticum aestivum
  Clone ID: LIB104-058-Q1-E1-H3
tcccgggccgacgccgtcatgaccatccccaagggctccctcttccccatgtgcggcatgaacctcgccttcgaccgcgagctcatcggcccggccatgtacttcggcctcatgggcgacggccagcccatcggacgctacgacgacatgtgggccggctggtgcgtcaaggtgatctgcgaccaccttgggctgggcgtcaagacggggctgccctacatctggcacagcaaggccagcaacccgttcgtgaacctgaagaaggagtacaagggcatcttctggcaggaggacatcatccccttcttccaggccgcgaagctgaccaaggaatgcgacaccgtgcagaagtgctacatctcgctctcgcagcaggtcaaggagaagctcggcaagatcgacccctacttcgtcaagctcgccgacgccatggtcacctgg

SEQ ID NO: 9045 - DNA, 374 bp, Triticum aestivum
  Clone ID: LIB104-058-Q1-E1-H4
agcagctaactagaccccagcgttgctggcagcgtcaaccccgacgatgaggtcaccgtcacccccaaccttgacgcccaggtcagtagaaggtacatttgattgctggtgtggatggaagagtgacaataactacaggttggtcaaaggttgaaagaaattctcctttaaattaggccaatgctactcaacttttctttgagtgacgaggaatttcaaccgtccttggcgaaggactgctatctgattgtcactagcctcgtgtgtaaatgcttcgctttcaatattttgtactatcttgctgccctatgtgctacttaagcctgatctattaaacattacttggcctattcctttgtgccgagcttgatgtg

SEQ ID NO: 9046 - DNA, 373 bp, Triticum aestivum
  Clone ID: LIB104-059-Q1-E1-A1
acggtcgtatctcacgggtggccattcgcccgcaggagagcaacgagcgcgctttcctatttggggtcaagagtggcgctgatggtgaaggtaccaccagtaccgtcctccttggcgaacaccttcttggtctcaggtggagctgccattgccttcttacgcttgccggttgagctcgatggtgcatcctcgacggtagcgcagcactccgaagaggtgcgcttgccggagtgggagtcagagctcttgccggacttggtcatgttcttccccccgggagcttcagcggcaagtgtcctgcgttctgctgcggctgctgcttcccggtagatctcgtcggatcagacaagatcatccatcatgtcgccaggaa

SEQ ID NO: 9047 - DNA, 402 bp, Triticum aestivum
  Clone ID: LIB104-059-Q1-E1-A10
gaaatcccggctcgacgggctacaaataaggtctttgaaaaagatccaaactctagaagatagtaaaccaccttcagtgttcatagatactgctccagcacagagaatttgtaggatcgaaagtatgtctagaggggggtgattagactactcgaccaaataaaaatctagccttttcccaattttaagtcttggcagattttaacaacttagcacaagtcaagtaatcaacctacacatgcaattctaagagtatagcagtggaatgtaaaacaattgcatatgaaggtaaagggaggagtttggagggagaaaacgcaatgtagacacggagatttttggcgtggttctgataggtggtgctatcgtacatccacattgatggagacttcaacccacgaa

SEQ ID NO: 9048 - DNA, 433 bp, Triticum aestivum
  Clone ID: LIB104-059-Q1-E1-A2
ggtggacgggcggtgcagccatcctagaaggggcttcagttggacctctgattgagcttgccatagactttgacccaagcatcctcgtgacagggtttgtcggaaccgccatcgccttcgggtgcttctctggcgccgccatcatcgccaagcgcagggagtacctgtacctcggcggcctgctctcctctggcctgccgatcctgctctggctgcagtttgccacgtccatctttggccactcctctggcagcttcatgtttgaggtctactttggcctgttgatcttcctggggtacatggtgtacgacacgcaggagatcatcgagagggcgcaccacggtgacatggactacatcaagcacgcgctcaacctcttcaccgacttcgtcgccgtcctcgtccgcatcctcatcatcatgctcaagaacgc

SEQ ID NO: 9049 - DNA, 424 bp, Triticum aestivum
  Clone ID: LIB104-059-Q1-E1-A3
gtgacgaatgacattggttggaggtgctatctcttggaagagcaagaaacaaacttctgtggcgcagtcttctatggaagcagagtacattgctgcgaatgaagctgtaaaagatggcgtttggttgaggaacttcctggtttctctcgagatagttgaaaatgcgtctgatccggtcacttttattgtgataattaagctgcgattaatctttccaaggattccaagtttcatagcagggctagacatattgagggaaagtaccattatattagagatgtaataaataggctgaaaactgttcggcttgcatttttgcctggtaatgatatgttggcagatccactgactaaacctcttagtcaggaattgttttgcaaacatgtcaggaacatgggccttaagatttttgattgaatgtttt

SEQ ID NO: 9050 - DNA, 454 bp, Triticum aestivum
  unsure at all n locations
  Clone ID: LIB104-059-Q1-E1-A4
ggtggacgggcgtcctcaaaacataaggtatcgtgctcatcctcacgaaatcccttggcttttcctttgctcatcttctcctttatctcttcaatctccttgtctgtcttctgagcttctctgatcctttccatcaaggtggactgaatctccaatgtcgctagatagcctcttgggactatctccaaacatagctcgcgaaggtcctcggctaactcctaaggtatctctcctgtcatgggggtgctgccatggatctcttgctgcagttccatgcgtangatgaagggttcatgaatcacgagtagcataggaacaaagtgatgagcaccggccgcggcacctttggtcatcttgttcttcaaacagattgcacagccagagcaaacaacattccacaccgangcagctangatgaacacagtantagtcgagcataaatatatgaatacag

SEQ ID NO: 9051 - DNA, 412 bp, Triticum aestivum
  Clone ID: LIB104-059-Q1-E1-A5
gggtacggatgcaaaagatctcggaggaggggaagggcgagtggaggaaggaagccgagaggaaggagcaggagcttgagaaggagcaggagacccagcagccaggactcaccggcagacccccgctcgccaacggcaggtctggaatgttgccaatgtcgagccctccagcaaatccgggacagcttaccattttttatggtgggtcagtatgtgtgtatgactcagtgccaccagagaaggctcaagcaatcatgctcattgcagcagcagcagctgcggcctcaaaaagcaatggcaccgctgctgttaagcctccagcgatgtctgcgaccaatgctatccaagccatgcttacgcggtcgctctcactccagagcacttctgtagcaaatggacaacctcaggctgt

SEQ ID NO: 9052 - DNA, 415 bp, Triticum aestivum
  unsure at all n locations
  Clone ID: LIB104-059-Q1-E1-A6
ggtcggggggtgattaattaggcatagggggagctaggagagtccaaatgtaggtgccaatgctggtcttggtgccggtgcaaatggaaatggtggtgctggtcttggtgtcggtgcacataaatctattggtgctaatgttggtgttggtgcgaatggaggcgctggtgctggtgttggtgctggccttggagcaaacgtaggtattggatcaaatgtaggtgccaatgctggtcttggtagcggtgctggtgctggtgctggtgctggtgcgaatgggggcgctaacattggagttggcattggagcaaatgtaggtgccaatgccagtcttggtgtcggtgcacataaaggtattggtgctggtgctggtcttggatcagatgtangtattggagcacatgttggtgccaat

SEQ ID NO: 9053 - DNA, 386 bp, Triticum aestivum
  Clone ID: LIB104-059-Q1-E1-A7
gtgaggcaacgctatctgagggaggcgttcgggatgtacgcatcatcatccacggaagccacgatgacgacgatgattacgccggcgagcctgaggcggacgctgagcaggctgggctctcacgaactgggcgtggacgagtgcacggcaatgatctgcagatttgacctcgacggcgacggtgccctctcgttcgatgagttccaggtcatgatgatggcctgatcatcgaccctcttcgtggcatttttctagactgatatgattttccacttaatgcatcgatcgatcacatgtatttgtacgtgttcattctttcgttgatttgctcgcacgatcatcctcgatttttgtgaacacgtgtacagattcatttggagtcacac

SEQ ID NO: 9054 - DNA, 415 bp, Triticum aestivum
  Clone ID: LIB104-059-Q1-E1-A8
gggcaagcccttgatgtttaagtgggccatcgcattattttgctctcgaaaaaagaagccatcacaaagcaggtatacatttggattatcaagtaacaatgtgggtttactcatactcttggacaagtgccctcggattcagaaaactctcatgagaagaaagtaaagcctgtctgaagaagctgctgctgcctaatgtaaataacatagccgttggttgggaagtctgcatcaaatcacattttcttattcaagggttgggaggagatggtgttgttttaattctttagttgttgatgatttctctttggccccaggaggggatggggatccttgtgccatgatccagaaattgtcaatgtgggttttggggggttgcttttgcttatattttctcaccagcaaaggctatatg

SEQ ID NO: 9055 - DNA, 397 bp, Triticum aestivum
  Clone ID: LIB104-059-Q1-E1-B1
gtcgacgggcatgcaaaaggaggaaagacaaagagattcagcggtctggtgttggtgtgacgactgaggagaggccacaccctgtgctgttagagagctccgttatccagcttgacgaggagctggacgcaggggtctccaagtgaagtggttgtaatcatggtagctactagttgtttttttgtcttgatctatctgggtctaagattctaaaatacattcgcccatacatcagtactagataggggtgtggcttgccacgcattgcccagccaacggtaagccatcggatatgataatcggttcaatatatagctgaattagatattttattgttgtgttgggagctgtcttgagcacatagttagaaatcatgtttgtagttgctgaaagaaaa

SEQ ID NO: 9056 - DNA, 295 bp, Triticum aestivum
  Clone ID: LIB104-059-Q1-E1-B10
cgacgggggggacagcgcggtgccgttcgtggtggcgctcttcagttgcatgcattggatcttctactcgctggtcaagaccaattccatcccgctgctcaggagcaatgcctgcagctgcgtcatccagggcttcaagatcctgccctacgtggggtactcgcccagagccggcaggcaccacgcccacgccttcttcctcatcgtcgacggctccgccttcgcactgaatgtcaccgtgagtgttctcctcgtacgacagcctagtcgcgtcaaagtccttgggagagtctgc

SEQ ID NO: 9057 - DNA, 386 bp, Triticum aestivum
  Clone ID: LIB104-059-Q1-E1-B11
cgaccgggatgaagagactgacatggtcaagcttgaggaagctgtccgaagcatcaagatggagggccttctgtggggcgcttccaagctcatgccagttggatatggcatcaagaagcttcagattatgatgaccatcattgatgaccttgtgtctgttgacactctgattgaagaccatctctgcgtcgagccagccaacgagtacatccagagctgtgacattgttgccttcaacaaaatctaaatcttcctgaggcaagtgatggcggtcggtggacaatgcagcagcacaaacaatatatctacagttttccgttgccgtagctaaagcagcataacatattctgccctgtgaggtttttggaccttaggttgagttgggt

SEQ ID NO: 9058 - DNA, 405 bp, Triticum aestivum
  Clone ID: LIB104-059-Q1-E1-B12
tcccggctcgacgggtcagtaaatttgatgatgttttacttttggaaagctgtatttgggtcagaactgcttggaaactagctatattaatgtaatgtaatgtaatgtattgtgtgtctgaactgcatctgttgtgaactgcctgctacctgtggtggtaacctagaatgctatctatatatgtgtggccttaactttattggtggtgaatgcttccttcatgtttagttgttgtttcatggtgcaatgaacacaaatggcgcttcggtgttgcttcagacatgctgcaacacttgtctatgatgtgggcaagtggaacatgctgtgcccatgtgccaattacaccaaatattgaatgtggcaatgttccaaaatggctgtcatgaattatagtacatggggttt

SEQ ID NO: 9059 - DNA, 422 bp, Triticum aestivum
  unsure at all n locations
  Clone ID: LIB104-059-Q1-E1-B3
ctgaataacggatggtgggaggggatcgtgctgcagcaggagactgctggccacgtccaagtttatctccaaggtgaactgcctgcctactctctctggctctcatcacctagctagcagttaatagtactccctctgtcccaaaataagtgtcttaactttatactagctctagtacaaatttgtccaaagctcaagacacttatttatggacggatggagtagtatatattcggttggtacttataacactggactggagcttttcctgatgcattgcatgcttgccaaaatttccaggggaggggagacttgtagagctccaagtggagtgtctgcggaagtcatttgagtggcgtgaggagcaatggctgcctctagatgcangaaaagatgttgcggccaagataacccttgacctg

SEQ ID NO: 9060 - DNA, 403 bp, Triticum aestivum
  unsure at all n locations
  Clone ID: LIB104-059-Q1-E1-B4
ggtgacgggcggggggggaaggaaagacccctggtcctatttataaaaggcaaagggataagtgacaggcgcgagaatcgaggagcccaaaagttagatatatggcagagctgtcgcctcgattgtcggaggctcattaaggaaggtgagctatatgcaatttttaataacaggtgacgtcatggcggtttatcatgattctggaagatgacattatggcggtttacaagaattctgtgaagatgatgatgcgtttaagattgacatgaaccagttcagatcaatctggggcctaatgttggggatattactactgggcataaaccggccaggagaggccgggttatccccacaatggtttactgtnactgaagcccatgaagacagacggtggtgctttatg

SEQ ID NO: 9061 - DNA, 377 bp, Triticum aestivum
  Clone ID: LIB104-059-Q1-E1-B5
atccaacatatcaagagatttagaaggccgaaatggttcaggcaacttattgggcaaggctcctcctatgtggaccgcgagagatttagaaggccgaaatgattcaggcaattgccgaacatccaacttaataagaccatcatggattccaaccgagttatttgtgatatccagaatataacccgacacaaagagttatttgtgatagaagtacatgcatttgcaaaaaatagataatgcattactcttatattctactccctttgtaaactaatataagactttttagatcactaaagtagtgatctaaaaagtctctattagtttacagagggagtagtatgctatctccatatttttgagattcttaaattatc

SEQ ID NO: 9062 - DNA, 478 bp, Triticum aestivum
  unsure at all n locations
  Clone ID: LIB104-059-Q1-E1-B6
ggcagcggcggaacgggcgatggccctggcttttgatggtggtgtggcggcaacggcggccggcaacagctaccgatgggcaccggcggcggagcgtgtggtgggtgttccgcgcacacccaatggggacgccacacgcactacactacgcctgggactgcgccgccgccgcggtgtagccacccagctggagttgtcttctgatgatggcggagtggctgagcgacaacgacggaccagtgccattggcgattgtgggagaagcagacgagataaggtacagggagggaggggaaaatgcgacacaggactcgccggtcgtgagggtttttatagcaggtcggtaagcattgggattttgggggatttcactgagtcagggagaagcttgcgcgggaaactgcgaggttgcgcgggaatgagctcancgacgattcatttggcacaccgtttggcaaaatgaacgcccccgcgcgct

SEQ ID NO: 9063 - DNA, 426 bp, Triticum aestivum
  Clone ID: LIB104-059-Q1-E1-B7
gcagcgatggcacgggcgatggcccggccttttgatggtggtgtggcggcaacggcggccggcaacagctaccgatgggcaccggcggcgggccgtgtggtgggtgttccgcgcacacccactggggacgccacacgcactagactacgcctgggactgcgcctccgccgcggtgtagccacccagctggagttgtcttcggatgatggctgagtggctgagcgacaacgacggaccagtgccattggcgattgtgggagaagcatacgagataaggtacatggagggatgggaaaatgcgacataggactcgccggtcgtgagggtttttagagcaggtcggtaagcattgggattttgggggatttcactgagtcagggacaagcttgcgcgggaacctgcgacgttgcgcgggaatgagctca

SEQ ID NO: 9064 - DNA, 467 bp, Triticum aestivum
  Clone ID: LIB104-059-Q1-E1-B8
gggattattacaaactgttctgttttagagagattctgtttttgatgcatagtttgcttgttttgatgaaactatcgattcatatcagtgaattaagccatgaaaaatttatattacagtagacacaatgcaaaaacaaaatatgaattggttttcaatagtacttagagtagtgatttgcttcattatactaacggatcttaccgagttttttgttgaagttttgtgtggatgaagtgttcgataatcgagaatgtcttgatgtgagaagaaggaagagaggcaagagctcaagcttggggatgcccgaggcaccccaagtaaatattcaaggagactcaagcgtctaagcttggggatgcctcggaaggcatcccctctttcttcaacaagtatcggtatgttttcggattcgtttcgttcatgtgatatgtgcaatcttggagcgtcttttgcatttagttttc

SEQ ID NO: 9065 - DNA, 405 bp, Triticum aestivum
  Clone ID: LIB104-059-Q1-E1-C10
gctcgacgggaagcaaaggcttgccgagttgctgaaggaggctggacgagggagaagcaggaaggcaaaatccctggaaaatcttctagagaccaacccatacaccatcgggaagaggactacagttgcaacgtgagtgaactacagcttttgaaagagaaaaaggaacactatgacgctaagaatttgtgtatcaattggtttattcaaatttggtgagaggggtaaatgggaatagcagtagcgttttgagtatcgagatacaaaaatggtctgattgattgttgtaaagttgcaaaggctattttcacttgttattacttgctcggtgtctagagcaattaactgtgctcgttgaacaggtgtgttttgcctagtcctactagttacatacactacaacaaa

SEQ ID NO: 9066 - DNA, 211 bp, Triticum aestivum
  Clone ID: LIB104-059-Q1-E1-C11
gttgctgaaggaggctggccgacggataagcaggacggcaagttccctgtaaaatcttctatagaccatcccatacaccatcgggaagacgactacatttgcaccgtcagtgaactaccgcttttgagagaacgaaggcacactatgacgctaagaatttgtgtggcaattggtttattcaaatttggtgagaggggtaactgggaatagg

SEQ ID NO: 9067 - DNA, 400 bp, Triticum aestivum
  Clone ID: LIB104-059-Q1-E1-C12
ctcgacctcagtggaagctgggaaaaaatagcgaagatcagtagaagggcgcccgttcaggggggcaacagacaccctttcgaggttggtggcggtagctggtccctccaatcggcccaaagttactaggccctggcagatcttcttctttgtttgggttcaagtccgagtcctcccactggcattccggataagaatgaatgtcaaataaggattagagttagaaacaaaccatgaagttgacatcaacggggaaacataaatttagacgagtaaagtacatagactagtactccctccataaagaattataagagcatttggatcactaaaatagtgatctaaacgctcttatattagtttatacagaggtagtaaatgtataccggatgcaagcatg

SEQ ID NO: 9068 - DNA, 425 bp, Triticum aestivum
  Clone ID: LIB104-059-Q1-E1-C2
ggtggacgggctttgaggatatcatagcctggcaacctaatcgcaccagaattttttcagtgaaaactgcgtaccatttgcaatggatgcacactaatagggcacatgcaaatatgatggagagtgcaagtcccacgtatggtggttcagcgcctttggcagtgtggaatacactttggaaagtgcaagtcccacgtagaattcagatttttgggtggagggttctgcgaggaatcgttccgctaaaagcaatcctgacaaacagacacattggttctaatggggcgtgcccgatatgccatcaaggtgctgaggatattaggcatcttttatttctatgtgtgcatgcaaaggaagtgtggaggcgtcttgggatgttgcaactggtggaagatgttgttctagtggattcgggctcgattata

SEQ ID NO: 9069 - DNA, 447 bp, Triticum aestivum
  unsure at all n locations
  Clone ID: LIB104-059-Q1-E1-C5
ggaagaaaaccgatcgatcacaccatgccgaaagggcagcaaagtcttgttacttgggccactccaaggttgagcgaagataaagtaaagcaatgtgttgatccaaagctcaacagtgactaccctccaaaagccgtcgccaagctagcagcagtggcagcgctgtgcgtgcagtacgaatccgacttcagaccgaacatgacgatcgttgtgaaggcgattcagccccttctcaaccaaaaaccggctggaccagccgccgaagcaccgaaaccctgatcgatcagcgctaggcggcacaaagaagcttgaatgaactcttgcatggttccatgtgttatatctatagatcatctacttgatttgtttaggtcatgggctgaccacctgtggcggtgctaggttcaaaaccttgtcatgtcaaaattttctgaacgaanatcgtgt

SEQ ID NO: 9070 - DNA, 406 bp, Triticum aestivum
  Clone ID: LIB104-059-Q1-E1-C6
ggaagaaaaacgagcgatcacaccatgccgaaagggcagcaaagtcttgttacttgggccactccaaggttgagcgaagataaagtaaagcaatgtgttgatccaaagctcaacagtgactaccctccaaaagccgtcgccaagctagcagcagtggcagcgctgtgcgtgcagtacgaatccgacttcagaccgaacatgacgatcgttgtgaaggcgattcagccccttctcaaccaaaaaccggctggaccagccgccgaagcaccgaaaccctgatcgatcagcgctaggcggcacaaagaagcttgaatgaactcttgcatggttccatgtgttatatctatagatcatctacttgatttgtttaggtcatgggctgaccacctgtggcggtgctaggttc

SEQ ID NO: 9071 - DNA, 392 bp, Triticum aestivum
  Clone ID: LIB104-059-Q1-E1-C7
gggggacaagtgacttattctgatgatgataaaacgctggccaaacagcgtgaggaaataaagcgcatgactgctgagtttgatgcgagcatgctggagatccgcaagaatttggatgctatggatgaaattgagaggcggagtgcggaggactatgagaagttccgtaagaagctaaacaatattgagaaagcatgcaatgttgctttgatcgtgctggtgcctagcactgttctgctttttatgtcactgtagtatcatctctattagttggttataagaaacccttatttaactagtgggttaagaaaccctaccttcagaactctatgtgttgtagtgatccagctttggactttgcattgcatcttaatgaacgcataatggtgagc

SEQ ID NO: 9072 - DNA, 222 bp, Triticum aestivum
  Clone ID: LIB104-059-Q1-E1-C8
ggtatcacaataattatgctttttcactcttattttataaggtttacatgaagagggagaatgccggcagctggaattctggactggaaaaggagaaaatattagagacctattctgcacaactccaaaagtactaaaacttcagggagaattattttggaatatataaaaaatattgggcgaagaaagcaccagagggggggcactagccatccacaaggg

SEQ ID NO: 9073 - DNA, 349 bp, Triticum aestivum
  Clone ID: LIB104-059-Q1-E1-C9
ggaagaattccgacagcacgacggcgtggtgacgatcttgatgaactacagcagcagggcttcgcctaaactccgctacagtattatcgaggaatatggtggcagggggcaccgcacacggctaaggaatagatcacgtggatcaacttgtgtgtctttggggtgcctctaccttagtatataaaggagccaaggggggagggggcgccggccaggaggagagggcgtaggaggagtcctactccttccgggagtacgactcacccccaatcctattccaactaggattccccaaacggggaaagagggagaagggtggccggccacctctccctactcctaataagac

SEQ ID NO: 9074 - DNA, 390 bp, Triticum aestivum
  Clone ID: LIB104-059-Q1-E1-D10
cgacggcaaaatacagtacaggatacagttccagaggccaaaccccgtcggcaccaacaatgcgcctccatcaccaaccaccgcggcagcagcggcgccgcggccaacaacgccgtcgtgcctgtccctgccgtcgcggagcatcagaacctgaaccggcacgagatcgagatcgaggggaagaagatcaacgacaccgacaagaggaacaacggaggagtcggagccgcgcaggtaccgacaagcaacgggcagacaacgccgccgacggccacgttcgacctgggtgtaaaaaaagccagaagacgctgtgagggagctgaacgagcagccgcaccgggagttcacgacggacgagaccgacagcgacgacatgggcgatgactacac

SEQ ID NO: 9075 - DNA, 363 bp, Triticum aestivum
  Clone ID: LIB104-059-Q1-E1-D11
tcatagtaccagaggccaaaccccgtcggcaccaacaatgcgcctccatcaccaaccaccgcggcagcagcggcgccgcggccaacaacgccgtcgtgcctgtccctgccgtcgcggagcatcagaacgctgaaccggcacgagatcgagatcgaggggaagaagatcaacgacaccgacaagaggaacaacggatgagtcggagccgcgcaggtaccgacaagcaacgggcagacaacgccgccgacggccacgttcgacctgcgtgtaaaaaaagccagaagacgctgtgagggacctgaacgagcagccgcaccgggagttcacgacgggcgagacggacagcgacgacatcggcgacga

SEQ ID NO: 9076 - DNA, 449 bp, Triticum aestivum
  Clone ID: LIB104-059-Q1-E1-D7
ggcttcccggtaaatctcgtcggcacagataagagcatccttcttgtcgccagggacagagatgacacttattgggcctggcattttcagtatcttgtacgcatagtgagaggctgccatgaacttggcgagtgccggacggccaaggattccattataaggtaatggaaagtcggcaacgtcaaacgtgaccctctcagtcctgaagttcagctcactgccaaatgttaccggcaacgtgatctttccctttggcttgctccttcccgggttgattccttgaaatgtgccggtctcttcgagctcgctgtcaggggtctggagcttctggagcaccgcggaggagatcaggttcaagccggccccgtcgtcaactagcatcttagtgaccttgaggttgcggattgttggtgaaaccaacatcggcaagcacccgaccgcagttatgc

SEQ ID NO: 9077 - DNA, 459 bp, Triticum aestivum
  unsure at all n locations
  Clone ID: LIB104-059-Q1-E1-D8
gggcagtttacttaaaaaatggaaggcatggttactgaccttactgttgcaagagatcatcaaactaagtttgaagagtttgtagctgatcatccggagtcgaatcctgaggtagacttggctgttactgtcttgacaactggattctggccaacctacaaaacttttgacataaaccttccctctgagatggtgaaatgtgtacaggtttttaaggagttctacgcaacaagaacaaagcacaggaagcttacctggatatactccttggggacctgcaatatcagtgcaaaatttgatgctaaaactatacagctcactgttacaacatatcaggctgcactgctgttgttattcaatggatctactaagcttagttactctgagaatgtaacacagctgaacctgtcagatgatgatgttgtccgtttgctcaantctctctcttgcgcgaaatac

SEQ ID NO: 9078 - DNA, 437 bp, Triticum aestivum
  unsure at all n locations
  Clone ID: LIB104-059-Q1-E1-E1
gggtggacgggcgagtgctggacagcatctttctttctctccgtgtgcatgttgcctgcctgagtttgcgagtggccgaagcgaagcaacctcttctctgctgcctgcaacttgccggacaagtctgaatctgcaatccagtgcgaaccaatcgcatcgatccgatccgatccgatcggaacggccggaccaaccaatcaatcaatgccgctgatgctgcgtgcaaggaacatccaggttagtctagcaccactgctgacagaaagatagtactccaatgggtgtgcgtgcactccaccgcgtgcgccagatagatagatagatagatagatcaatcaattatcgtggattcaatcatcacccatgcgtgtcgctcacnagacataacgtctgcattatcagttgttgttgatagcactaataactcccctgccaag

SEQ ID NO: 9079 - DNA, 396 bp, Triticum aestivum
  Clone ID: LIB104-059-Q1-E1-E10
cgaccgcgacggaaccctcacctacggcggctactccagcatggtggtggtgcacgagcgcttcgtggtccggttcccggacgccatgccgctggacaagggcgcgcccctgctgtgcgccggcatcaccatgtacacccccatgaagtaccacgggctgaacgctcccgggatgcacctcggcgtgctgggcctgggcgggctcggtcacgtcgccgtcaagttcggcaaggccttcgggatgaaggtgacggtgatcagctcatcgccggggaagaagcaggaggccctcgagaggctaggcgccgacggcttcgttgtcagcaagaacgccgacgagatgaaggctgcgatgagcaccatggatggcatcataaacacggtgtctgcaaacat

SEQ ID NO: 9080 - DNA, 389 bp, Triticum aestivum
  Clone ID: LIB104-059-Q1-E1-E11
tcccggctcgacggggtttcatgagtggagctggtgaaacggaacttcaactacaacgcaggagaatccaagaacgtcgtctaagcttgttagctcaaattgaagacgtacgccgaactagggcgatacagcgttcgagtcgaaagaagcatggtggcccatttggtcaagaccttgtaactgtggcagtcgtcggatatacaaatgctggaaaatctactctagtgaatgcactttctggagctggtctatacagtgatgatagattatttgcaacagtagatcctcgattacgcagtgtgattcttccatcagggagaaaaatacttctcagcgataccgttggcttcatatcagatttgcctgtacagctagtggaagcatttcat

SEQ ID NO: 9081 - DNA, 410 bp, Triticum aestivum
  Clone ID: LIB104-059-Q1-E1-E12
atatcccggctcgacgggcaatgagtcgtttaccgagcggtagaggtgaacatttgaaccatgcactctgcatgaaggtggtgatgaatataaaggtgtcgattaccagtccgtaaatgtgggtgacattgtagataacttccgtcttcaggagcagactgcttttgtttggaagcattttagctctcacataaatcactacaacagtaaccactctgcgaaacattctagggataacatagaatgttttcaagaccaatgttcaggtctgcgatacacgtaaacatctatacacagcctcacgagacacttcaatacattgttggttaaattaagcattaagatgacagggatttctccgactactgtcaggaaggatcagctgattgaacattcctgtactttgcaca

SEQ ID NO: 9082 - DNA, 470 bp, Triticum aestivum
  Clone ID: LIB104-059-Q1-E1-E2
ggtccgtacttatcgggtggccggcaggtccaacacaacttttttagaccgtactctctattttgcgagcttgtaaagtgcattttacctcagccatcgacccttggcatgtcaaatatccagggtcgtggcgttattatatacaaaacaatgattggcatgtcactcaagttctagtgaatataatttatatcatgtattcacttttctctaaaaaaactgtattttgctcctttagttatttcacacgccgtgccaggggctcgatatgggaacaaactaaattgccaataagtctgaacagctttatagcatacttcggcgtcgcgactttggccttatatgcatcagctccgaatcatgtcttggctcaatagtttggtttcccggctcctgtgcttgctaccttacgttccgctctatccgctaaggtagtaaagggagaactactgcgattgtgccctggttta

SEQ ID NO: 9083 - DNA, 427 bp, Triticum aestivum
  Clone ID: LIB104-059-Q1-E1-E5
ggggggtgagaggacgacctgtcctctgcgttggctgtcgaagaagagtgctacgagcaagttctgcacactcaggatcgccttgaaggtctagctgcatttgcagagaaaagaagacctttgtacacaggaaagtgaggccgtactgaagtcagccctgttagcctcttatgtcttatctgctgataccctgaagaatgtgtccttgttccaaagaaaaaaaaaacctgaagaatgtgtctgggttgctagattatttgcagatgtatgtgctacatcttctgattgtcatgatcgcctaaaactgaatgaaccgcacccatgtaactgtaaggtatgaaagctgcatctggagatgctgcggtttggtttcgtcaaaaaaaaaacaacttggtgttgaatacaactaataacccccctgccaaca

SEQ ID NO: 9084 - DNA, 442 bp, Triticum aestivum
  Clone ID: LIB104-059-Q1-E1-E6
gggcattataggaagttcccaaacaaaatggtaaagtttatactcccctccaccaacaagcatcaatccatggcttgctcgaaacaacgagtgcctccaactaacaagagtcccagggggagttttgtttgcaattattttgatttagtttgcataaagcatgggactgggcatccctatgaccaaccactttctcgtgagtgaggagcggagtccactcctcttgagaataacccgcctaacatggaagatacgaacaaccctagttgatacatgagctattcgagcatacaaaacaggatatttatttgaagatttagagtttggcacatacaaatttacttggaacggcaggtagataccgtatataggtagatatggtggactcatatggaataactttggggtttatgggattggatgcacaagcagtattcccgct

SEQ ID NO: 9085 - DNA, 422 bp, Triticum aestivum
  Clone ID: LIB104-059-Q1-E1-E7
ggcccagtatctaaataaactgggatgtttagttcgtggaggggacggtcacaattggaaccatctagctctagggttagaacgcaacttatgatctcgaggtagatcaagcttgtactcgatacacaatcatcaatacaatcaaagcaagacgtagggtattacctcttcgagagggcccggacctgggtaaatactgtctcctttgtcccctgttacccataaatctgagatacacagttcgggaccccctaccccgaggtctgccggtttttactaccgacacctacaatgtcgctggcgccgacgtagaagcactgagctttcgctcggtacctcctccctcatacattgttgtggaaacttgaccatcgagcccactccaaggaggcccaccgccgccatgatgaatttgggccttc

SEQ ID NO: 9086 - DNA, 463 bp, Triticum aestivum
  Clone ID: LIB104-059-Q1-E1-E8
gggcatgtaagagagacatgatttacagaaccaggtgttggtacacctgctagtgtataagaacaacgaatgtgaagttttcctctgcggcatttggttagaggcaccgaggtaaacttatttttgattgaatcatgatgagaaatatattcacgcgagtcaccccaattttgtttaaaatcgtatcaataaggagatatttaacacaacacaatcataacttgcacgcgatgtacgccttgtgaattaatcatgttcttaccaatgcctcatgtctaaattttttgttccatgagggcattcatgtagacccatccttgtttttctcgtgacaatatcttcaaagctagacccatttttcggtgtctcctttgtacctatatgttggatctttttcacgtgctaaagccaagtggactcgcccccgctcggtagcggcacacacctagaacgaacaacgcgc

SEQ ID NO: 9087 - DNA, 396 bp, Triticum aestivum
  Clone ID: LIB104-059-Q1-E1-E9
cccggctcgacggggtagcaactggggatgctgttcctgaaaccagatctgttgcaaaaggtgtactggatgttatatcaggtgacttgccaaaaagcatcaaattgcagaataaacatcttgctgcactaatcgaattgcacaacatgactggcacttttgctcggaacattcagcacttattttcagaatcagatcttggagttgtgctgagtacattgaaagctatttattccccatatgaaacctttaagatgaggtatgggcagatggagcgcgctgtgctttctgctgcaatggccggtatagatatccgtggagccatctcccgtggtttaggtgcacaaggtatagagctaagtgaaactgtccgtaggatggaggaatccatcccac

SEQ ID NO: 9088 - DNA, 335 bp, Triticum aestivum
  Clone ID: LIB104-059-Q1-E1-F1
caccgaggaaccagtggcgagtacaccgtggaagaacaaatcctgttgtcggagaggtatcctcgatgatgatctgttttggcctgaagaacaactctactgcatggttccttgtaatacatgtcaagtcaaaggacgtcttcggatgattttgctgaggatgaaacctagtttttgttcaactgtaaatctttctggaagcaatttggtagcgacatttccttgattcagatgattttgtacattttttcatgtgaacgttaagaaggtgtttgtttccagggacttattggtttagggacttaaaaaagtccctataagtcccacctaaacca

SEQ ID NO: 9089 - DNA, 386 bp, Triticum aestivum
  Clone ID: LIB104-059-Q1-E1-F10
cgaccgggtctgataccaagcttcaaagacactggctgagaaggcagcatggaagtttgcagaggagaatggactggatgtagttgttgtcaatccagggactgttttgggcccgatgattccgccaaggatcaatgctagcatgggcatgtttcttcgcttacttgaaggctgcactgaggagtataaggatttcttcattgggccagtccacgtggaagacgtcgcattagcccatatcacgctgttcgaaaacccgtcggcgtccgggaggcacctctgcgtggagcccatctgtcactggagcgatttcgcgtcgaaagtcgccgagctctaccctgactacaaggtcccaaaattccccgaggacacgcagccggggctgg

SEQ ID NO: 9090 - DNA, 399 bp, Triticum aestivum
  Clone ID: LIB104-059-Q1-E1-F11
cccggctcgacgggtaataaattttgcatctactttctgtttagttgtgttttcatgtttcatttagtgtttgtgccaagtagaacctataggataacctatgatatgagttgatttgattctgctgaaaaacagaaactttgcgctcacgagaaacaaattgataaatcacagaaacgagattttgcattgattctttttgcttatgttcaataaacaaattgtttaggacgtcctattttggtaggatttttaaagttccataagtttgcgttagttacatattgctacagactgttctgtttttgacagattctgtttttcgtgtgttgtttgcttattttgatgcatctatggctagtatgtatgggtatgaaccatagagaacttggaatacag

SEQ ID NO: 9091 - DNA, 389 bp, Triticum aestivum
  Clone ID: LIB104-059-Q1-E1-F12
tcgaccggggcatagcaaaaaagttggagggaccatcttgtgaagaaagaagagaagtagaagggccaaagagcaaagcagcagatctgatcgaggggaacaaaatccctagaatgcctctattccccaaggggcctggcacatctctccatctcatctcttccccgcctccttctccacctccggccgctgccgcagccaggccatcgtggtggtgcgccacccagacaacctccttcctccaacaccatcatcgcctccagctaccacgccatcagcacctgccgctgcaccattaaccgtgccaccagctccaccgcgccaccgcatcaccggtgggccaccaaccagcgcacctccctcaccctgctgctcatcttcttctcccc

SEQ ID NO: 9092 - DNA, 339 bp, Triticum aestivum
  Clone ID: LIB104-059-Q1-E1-F3
tgtcagttaaaaaaaatgtaaaaaaaaaaccagaaaaaaaaaatctaaacatacataatacaaggaaaacaagttgagtcagtatgcaaaaaaaatcgggccgcccaaaagattcaaacctaacttagccgttaagtcaaggccaaagccctccaaacaggcccccaaaatcgactccaaggccattcttttaaaaagttcataacgggaaaaacctgggtttaaccaaattaaacccccttgcacaaaatccccttttcccaaccgggcttaaaaccaaaaaggccccaaccaatgccccttccaaaaatttccccaccctaaatgccaaatggaacc

SEQ ID NO: 9093 - DNA, 310 bp, Triticum aestivum
  Clone ID: LIB104-059-Q1-E1-F4
tccgagaaggtcaatgaccaaatcgtcctcaaatgcgtacgtcatcgagctcctctcccggttccgccgacgctcatcaagggccgctgccatgtttccaacctggatatccggaacttcctggtcggcatctattttaccgtgaagggcactatcaatgaagggtccatattctgaaaccttcccgcccagaaaaacccttgtttctcccagccgtgtttgtttcaccctgtttccatcttgcccatcctcggcgtcttcctgaattttgccactttcccataccctgaattttttattcggctttcaa

SEQ ID NO: 9094 - DNA, 438 bp, Triticum aestivum
  unsure at all n locations
  Clone ID: LIB104-059-Q1-E1-F5
ggctccttatgacaatcataatcttaaaaaattctatggaaaatttaagagttccctaacatcaaacaccaccttttgttgttagcgtcatcgcagtcactccaaggtaacaccactttgatatgtattgcatcaataatctgctagttactggtgtgttgatgttggctcctcggagccatttggtggacgacattgacacccaaaaatttgaggagttttatgattttcttgacaaatgggtggcagatcagcctcaatctagcaggacaagtggttgcccctcaaaggagaagccaggcagggagaaagcaaagaggaacaaaagtaagaagagtggcgccattcgaaaggcgtacatggtttcatgatggagggtgctcaggttttgccgttgtcggtgtgtttggcangagtgtcattgtgttgtgcaagtgt

SEQ ID NO: 9095 - DNA, 430 bp, Triticum aestivum
  Clone ID: LIB104-059-Q1-E1-F6
ggggtcaccatccagcggtccgagaaggtcaaggacgagatcgtcctcgacggcaacgacatcgagctcgtctcccgctccgccgccctcatcaaccagaaatgccatgtcaagaacaaggatatcaggaagttcttggacggcatctacgtcagcgacaagggcgccatcaaggaggagtagagagccggaaaccgtcccgcccaccagaagccgtgtttctgcctgccgtgtttgtttcatcgtgtttgtgtctgtctgtcgtcgtcgtcttcgtgattttgaactttctctagactgaattttgtagcggagttaaatttttagggatgtgccgtggaacatgctatctttattgttatcctgcatatcgtcgccgccgcgagaaacggtgcgacgcttatctagccctaaaggctgaagacatgga

SEQ ID NO: 9096 - DNA, 474 bp, Triticum aestivum
  Clone ID: LIB104-059-Q1-E1-F7
ggaccacaaacaaacagtcgatcgatgatctcgacaaccatcaacagcaggatggctaacaccaccagctccaccgccctcctcatcgccctcgtcgtcctggccggcctcgccgacttgcacgctgccacagccgacccgaggcccgttcacgcctcggaactctcggtgccggcatgggtgaccgggcagccaatgacggccccggagctggaatggatgatggagtgcatgatggggtgctggacgacggtgatgggttgcgtattcgggtgcgtggccaagccccccgccgacatgccgctctgctggttcgcctacgaccagacctacgttatgggcatggtcaaatgcgccttcacgccctcaccgccagcaccggcgccacccaagccgcatgccccgcccgcccggccatgacaccgtaacgatcgagacctctacctagtcgccgacaatcaccatgcatgcatc

SEQ ID NO: 9097 - DNA, 467 bp, Triticum aestivum
  Clone ID: LIB104-059-Q1-E1-F8
ggggaatacttccaatatcaacacacaacgaaggcaacaactgtagtacgtacgtaagtgtagcttagcctcctcctgtactgcatgccatggcgatgctgaagaagaacacgagctccctgagcttcgtcatggtcgccctcatggtggtcatggctgccacccttctctactcatgcgacgcccgcaaagtgaaggataagcccaccgctttccccgtggcggggaagtgcttctcgaggtttttcgcgaactgcaccgagccgcggtgcaagaagttctgcgtccagccactccccggagccgtctgtatcgacaaaaaccattgttgctgccctattgcttagttataagcgccgctgaagcagtcaggctaagaaatactagttaaaggtggcaataagtaatattcgtacacttccaaatatatactacccctgtttctaaatataaggcttttttgcagt

SEQ ID NO: 9098 - DNA, 311 bp, Triticum aestivum
  Clone ID: LIB104-059-Q1-E1-F9
cgacgggccacgagcgacaagtttgtgggtgtcatgagagcgatcggcgtcatgcaggaccttttcataaccaagacttggtaacaacgtacggagtacctcgcctaatttttattttgtttcttcttcattggtggatttccatcgtgtctatgagcacaggcttctggattttgatatattctgcattaccatgatgtacttatttgtactttgacactttttctctgtttaatgagtggttgtgtgcatcgcttgatgcagaggcagggtccgttcataaaaataaagatgttctaattctttgaatc

SEQ ID NO: 9099 - DNA, 105 bp, Triticum aestivum
  unsure at all n locations
  Clone ID: LIB104-059-Q1-E1-G1
ggtggacgggggaaacaggttaatcaagaccgctgcttacggtcactttggccgcgattatgccgacatcacctgngaagtggtgaatcccctcacgttcgacaa

SEQ ID NO: 9100 - DNA, 371 bp, Triticum aestivum
  Clone ID: LIB104-059-Q1-E1-G10
gggcagagtggaagcctacttcgacgacggtgctgggtcgctggagatcaaggtccccaagaggagcagcgacgcgcaccaacaagcctgagagaatcggaacctctcgacgcccgcaactggattggatcagattaactggaggaccgcctcatttgccggtgaaaggcaattattctccttctgatgtgatgatgagcagttgatggcgactcaaaagaccgcgtaatctctgtagaaattcggaaagatatggctgagacgaaaagcagcgaggattacctacctatctatccattgcatgatgttgcaaatccaatgtagtagtaaaatatgttcttcagttccactgttaccaaatgactaattaa

SEQ ID NO: 9101 - DNA, 398 bp, Triticum aestivum
  Clone ID: LIB104-059-Q1-E1-G11
cgaccgcgacggaaccctcacctacggcggctactccagcatggtggtggtgcacgagcgcttcgtggtccggttcccggacgccatgccgctggacaagggcgcgcccctgctgtgcgccggcatcaccgtgtacacccccatgaagtaccacgggctgaacgctcccgggatgcacctcggcgtgctgggcctgggcgggctcggtcacgtcgccgtcaagttcggcaaggccttcgggatgaaggtgacggtgatcagctcatcgccggggaagaagcaggaggccctcgagaggctaggcgccgacggcttcgttgtcagcaagaacgccgacgagatgaaggctgcgatgagcaccatggatggcatcataaacacggtgtctgcaaacatcc

SEQ ID NO: 9102 - DNA, 391 bp, Triticum aestivum
  Clone ID: LIB104-059-Q1-E1-G12
cgaccggttttcacaaatacgatcaatagacatgaagaaagccgggatgcaaaggatacacaaaatatggaaacttcggacaagtttgttgatcataggagcattgagacgcagacaaatccaattgatcgttctatagcactcttactttttcatcagccatcagaccaagtggttggagctgttgacaatcctcgccactaaaatctcataacgagaaccacaaggcctatgctaaaaactaggttggttaatgttgcgaaaattactggagatggctcgtggaaattcaaggatcgcctttattcatatgtaatcatcatctccgtgaatgcaggagcaattgtgaatgtttatccgatatggtatggtatgcaccgttttaatcgtt

SEQ ID NO: 9103 - DNA, 249 bp, Triticum aestivum
  Clone ID: LIB104-059-Q1-E1-G2
tatgcttaatgtcactttgggcgcgattatgccgacttctcctgtgacgtggtgatgcccctcatgttccatatggcatctgcctaaattcatggtgttctcttggtcagctgcctctcaagttcgtcatcacgggtatatgttgctcctgggatgtgagatcttgcattatttactgattccacgctctacactggtcttgttctatgttactcattggtaagtttcttattgtcatttcatatattt

SEQ ID NO: 9104 - DNA, 153 bp, Triticum aestivum
  Clone ID: LIB104-059-Q1-E1-G3
cctataaagagacgtattaatctcttagtggtattgttggtatgaggcctgtatttcgtgtgccctggtgctacttcattagtcacgctttatgaagtattgactcaggagttactctttcttgggttctaccttatttgcttttaatatgac

SEQ ID NO: 9105 - DNA, 487 bp, Triticum aestivum
  unsure at all n locations
  Clone ID: LIB104-059-Q1-E1-G4
cgggtggccgggaaacaaacctagacttgacttggcgtaaatctccctagtaacggtgccagaatttctttctgctacttcttgagcgtgtgttggtttttcccttgaagaggaaagggtgttgcaggaacgtagagataagtatttccctcagttagagaaccaaggtatcaatccagtaggagacaacacacaaatcaccgaatacctgcacaaacaatcacacaacttgcacccaacgcgatataggggttgtcaatcccttcacggttacttgcaaaagtgagatctgatagagataggtaaacgataaggtacatatttttggtattgttggtttatagatcggaaagtaaaatattgcaaaatagtagattggaaactaatatgatggaaaattgacctgggagccataggtttcactagaggcttctctcaagatagaanataatacggtgagtgaatgaaatactgtcgagaaattgat

SEQ ID NO: 9106 - DNA, 359 bp, Triticum aestivum
  Clone ID: LIB104-059-Q1-E1-G5
ggggagttacatgaccggctgaataaatagtactactgtagctacgatacctgtagttcgcctgccctgctgctacttcagtagtcatgcttgaataataatggtctcagtattaatctttcgcaaaaaaaaaaaaaaaaaaaaaaaaaaaaaaaaaaaaaaaaaaaaaaaaaaaaaaaaaaaaaaaaaaaaaaaaaaaaaaaaaaaaaaaaaaaaaaaaaaaaaaaaaaaaaaaaaaaaaaaaaaaaaaaaaaaaaaaaaaaaaaagggggcccccaaaaggtttaaactttaatttccgtttaaagaaaattaaaaacctttcaaaaggggccaaaaaattaaattaaaggggcgtt

SEQ ID NO: 9107 - DNA, 471 bp, Triticum aestivum
  Clone ID: LIB104-059-Q1-E1-G7
ggatccccaagcatgaacttttgtgtctccttaattcctctcatatcatggtttctctttttatcaagagcttcattcacaacaaactcaacaagaactcgtgagataggttagtacaaaccaatgcaaaaccttattattttttactataacaaatcactagaattattattcaacatttaatactaaattcctctgcatatttaatactcctatcctcaaatagaatcattaaacaagcaaacatacgcaaacaatgcaaacataacagcaatctgccaaaacaatatagtctgtaaagaatgcaagagtaacaatacttccctgactccaaaattatgaaataaaattcccactgtaataaatttatcagatcttaatatgcaaaaagattcaacattataccatttcttacttttctagggaatttttgcaacagcggtaaactttccattttcaaacagcaacatg

SEQ ID NO: 9108 - DNA, 417 bp, Triticum aestivum
  Clone ID: LIB104-059-Q1-E1-G8
gggccttaatgtatcattgctctctatgtgttacattgcctagcatattccatgtgctgacccgtttcgggctgcaacgttcatgttgcagacttttcagacgatgagtaaggtgcctttaggtcgtggttctatactcagtgatgccgttggagttgatggactcacttatgttgcaagccttccactgttatcgttattagatggccttaagccatatttattgtaataagttctcttttgagacactcgatgtaataagtgtgtgattgctactctgttataaatccttcaagtactgtgtggtgtcagcatttctgatccagggatgacaccagagcacagagattggaccgtttgaggtccactcgctacatcattgcatatcccggtacaccgccataggcattcatagag

SEQ ID NO: 9109 - DNA, 287 bp, Triticum aestivum
  Clone ID: LIB104-059-Q1-E1-G9
cccggctcgacggggtcttatttgaaggatatatctctgctcaatgtatctgtcctcttggcaacaagactttctgcccgctgtgacgaattgtccagaccagttgcataaatacatttcatggcacgagacaggtggattgtgcgtttattttcataaatatatagacctgtacgtctgaaagtgttgttgacatttcatggcgttttttggggcaaatacatttcatgtttgtatttgtggattgcatcagttcctttgaatcctatcagttgttgctcttgctt

SEQ ID NO: 9110 - DNA, 172 bp, Triticum aestivum
  Clone ID: LIB104-059-Q1-E1-H1
tatctcatagctaattcccataatcaagtttattttctccaatgatcttcgtgaatttcttaacaatatcctccttggatatctatccctttcgacctagtttcaaatgttgctttaaataatcccatgcatttatatgttatgaccttgagcatcataggtctttctctca

SEQ ID NO: 9111 - DNA, 199 bp, Triticum aestivum
  Clone ID: LIB104-059-Q1-E1-H10
gagtgagacgaagtactgcttgctccctttctgcgcttcctttttaccaccgctacttgcttaagtgtctttttaagtttgtttttgacctcgccgttgtagatggtcccttttggttcaaaggaaaacaaaaaaaaaaaaaataagattaacaaaaaaagaaaccaaaaatagaaaaaaaaaactggacatcaaaaag

SEQ ID NO: 9112 - DNA, 400 bp, Triticum aestivum
  Clone ID: LIB104-059-Q1-E1-H11
cgacgtacaccgatcacctcgacgtgcccgggtggctcaaggtgaaggtggagccagaggcgctggagttcacgtcggcgatggagaagaagacattcacggtgaccgtgagcagcaggggaggcgacgccgacgccgggcagctggcagaggggagcctacgctgggtgtctgaagatcacgtggtgcggagcccgatcatcgcggacgccagggttgtcccgacatgattctgtcaggcgttcgttgtactcagccagcctggttagcataagcacaagtatccatacagttcacaacatggagacattatcgttcttcccaactagcactactccttgaggtcccgattgcaaacatgcaatcacacaaatagggcacttatcaaaggaagtcactg

SEQ ID NO: 9113 - DNA, 371 bp, Triticum aestivum
  Clone ID: LIB104-059-Q1-E1-H4
gacttgtgctcatcaactactcggaggcagacttcaccgtgaagccccgcgaccgcgtcatacagatgatcgtccaggtgattgcgacgcaggaggtccccggggtggaggacctcgacgccaccgtctagaggtcgccgaggtggaggacgacgccaccatccggagttcgtcaaggtggaggacctcgacgctttgtacatacatctagggaagtggtctggttaggttggtggtgaaacgctagggaaggtaccaaccttttgttgatggttgtgtgtgtcctcgggatctcttcgagttgagatgttgaatgttgcatccatgaacactgcaagtgttaagatggttctgtgaaatttattttgcac

SEQ ID NO: 9114 - DNA, 446 bp, Triticum aestivum
  Clone ID: LIB104-059-Q1-E1-H5
ggtggccggggagggaatgaaccatagagaagttggaatacagcagatattacaccaatacaaataaagaatgagttcacagcagtacctaagtggtgatttattttcttatactaacggagcttacgagttttctgttgagttttgtgttgtgaagttttcaagttttgggtaaagattcgatggactatggaatgaggagtggcaagagtctaagcttggggatgcccaaggcaccccatggtaatatttaaggacaaccaagagcctaagcttggggatgccccggatggcatcccctctttcgtcttcgtctatcggtaactttacttggagctatatttttattcaccacatgatatgtgttttgcttggagtgttaatttaattttattttgctttggttgctgtttgaataaaatcccaagatctgaaattcctaaatg

SEQ ID NO: 9115 - DNA, 378 bp, Triticum aestivum
  Clone ID: LIB104-059-Q1-E1-H6
ttccgggtcgccggggagtgtgtgtatgttcagaacagatgtgttttcagaacttattacttttgatacactgcccctttatgttgagcagatgcggattatatttagggagattaagatgctcaagaccaaggaatgcatactgaaggctgccaatgatacccttcaagaaaggccctaacagataaatggaagcatctattgggtggtactctcactgcttagcaaagagaatgaagggtcaacatttacggtcatgctgcccacgcttcggaaaaaaggcaaaaatgttttacggctcaagcatgggaagtatagaccaaagaatgtggtttacagtttccctattttgttggattagctaatgtgttgatttgt

SEQ ID NO: 9116 - DNA, 444 bp, Triticum aestivum
  Clone ID: LIB104-059-Q1-E1-H7
cccttagggtttatggaatatttgggtatttatatagatgagaggcagtggaaaggactcctgtgggccccactacccatcagggcgcgccaggggcctctagcacgccttggtgtcttgtgggccccacaggcctcccctctcgcacttccttggctcccaagttgtcttttgggcaaaaaaatctccaaaaagtttcactgtgtttggactccatttgatatggatattctgcaaagtaaaaaacaagcaaaaaacaacaactggcacttggcactatgtcaataggttagtcccaaaaactgatataaagttgttataaaatgaatataaaacatcccagaatgataatataacagcatggaacaataaaaaataatagatacgttggagacgtatcacactgccagaggcattcatatatagtcctaatgttctagatat

SEQ ID NO: 9117 - DNA, 347 bp, Triticum aestivum
  Clone ID: LIB104-059-Q1-E1-H8
gggacgacatcagacctcacgtcgattgaggttgcttaggaataggctctgcaggagagaactttggtcttcagtttcaaagacactacgctttcctgcgatacctcacgcaaaaccatcaggccttcttgtctcttagttttcaggacctaacaatttgtggatcatcattgttaataagctcatgggctgggggtgccacgaaacagacatccgagggatgaaaactggttgagattgtcggtgtgtatattatattattgtgttgcatgtataagtgaatctcatcaccaagtagtggtgatgaaatgtcacctgtgtggctgtgtactcgaaagtggaaatgc

SEQ ID NO: 9118 - DNA, 406 bp, Triticum aestivum
  Clone ID: LIB104-059-Q1-E1-H9
cggctcgacggggctgtagaatacatgcccgaagaggaggtgaagagcacagctgcggagcgactgaagatatccatggagaggatagcgctactcaaggcagccaaacctaagatgccgcccgcgaaaaccgagcaagaggaagaggagaggaagcagagcgaggagttggacggatttgggaaccccaagggcccctccacgctctccaagctcacagcggaggaagccgagcaccgtgccctccaagcagccgtgctccaggagtggcaccagctgtgcaaggagaaagtcatgaaggcacagtgaggcctggtctgcgctccgcctgtataattttgtacctgccttttcctcgagccacattttgatttatttttttcagccgtccgacattttgattttt

SEQ ID NO: 9119 - DNA, 409 bp, Triticum aestivum
  Clone ID: LIB104-060-Q1-E1-A1
tcgacggggaccaatctgaaaagccatgcaattcacggcctcccaaaacaatgttgggcgccatgcatgcaatgtggaacatagaacgcatcccaaggttcttcaaagggttacatgctcagatactaaagacagttctgagctccgcattactgctgatgataaaagagaagatttcaaagttcacttggatctcgctgcttgctctgcggcgatatctctttgtttctcggaagaaaatcaacagtgcagagttgtatcatgcatatgtcatacctgagaaaactagtctaatcgtccactggtatttcaagatcgtattacaccacatagtagaagtacagaatcataacatcacgatcaacttgagatccccatggaatgttctgaaaaaaattggtcggttttt

SEQ ID NO: 9120 - DNA, 194 bp, Triticum aestivum
  Clone ID: LIB104-060-Q1-E1-A10
ggggtcgctgcactggttcagacgtcggcggtagagtatggcagctgacttcaccgaggagcttgtgtcagactcgatgattagtaggatcaatttcttgtctaggacgggctcggtcatggatccgagtggggactctaccagcccggattcagcctcaaagagtggtggcggttcgttcctcaataggttta

SEQ ID NO: 9121 - DNA, 303 bp, Triticum aestivum
  Clone ID: LIB104-060-Q1-E1-A11
tcgacgggtcaaaagtgaacgtgaatggaggagccatcgctatggggcatcctcttggagcaacaggcgcccggtgcatctcgacccttctgaacgaaatgaagcgccggggcagggactgcagattcggcgtggtgaccatgtgcatcgggtccggcatgggcgcggcggccgtgttcgagcggggggactcggtggacgagctctccaacgtgcgccatatctagtcgcacaatttcctgtccaaggatgctgcagagtacacgcgggcgtgaaacgaagtccatcagcctcacatgcagc

SEQ ID NO: 9122 - DNA, 423 bp, Triticum aestivum
  Clone ID: LIB104-060-Q1-E1-A12
caggttacggtacggagttccggcgtcgacgggaggccaggcatcgcgccggccttcaggaacgccgacggcggcaacggcaccatcaaaaccggcaacggctacccgtacgccagggtggcgacacccaaacggtccaaggtacgtgcgtgcgttctctgcgcgcgcaacgggcgtgccttggtttatcgcgtgcattgacgccaccaactttttgtccgcagaagaagagctggttctcctgcaccagctgccgattctgatgccgtagctgcttgccgtcggtggtgagagagatccgatacttcgccgcgccacgaccagatgcacgtactcggcgggaggcgacggtggaacttttggcgatcgtggtgcttctgaccctgctcggtcgccgcatctcacgtgcagaacatcatccat

SEQ ID NO: 9123 - DNA, 404 bp, Triticum aestivum
  Clone ID: LIB104-060-Q1-E1-A2
acggcgacgaaccgatctaccttgatctagcggcagaggagactagcaagggctggatttgattctctgggtatttcctaatataacaacaaaatttcataatacaaccagtgatgattttccaatcaaacctatataattgcaagctaaatgccaatcgtttcattatacaatgatcgttcttgatatattttaattttccataggacatttcctagtagcaaggtatttcatgtcatattttggagtaatttgattatcaacttcgtctactcgttgcgtatgtgaaattattgccctatattagctgtagctagacacccgctccagctgcaaaaaaagaagtgtgtgtctatgcatgaaatgtgaatattgggtaggttctttgaagcaaaaaaaaaaca

SEQ ID NO: 9124 - DNA, 400 bp, Triticum aestivum
  Clone ID: LIB104-060-Q1-E1-A3
ggtcgacgggtatataggagaaagaagtacgtcggtggacgcccgaggggcccacgagatggggggcgcgccctatgggggggcgtgccctccaccctcgtggccgcctcgggagcttcttgacttgcactccaagtcctctggatcacgttcgttccaaaaatcacgtttaattcctgctcatccttgagtaggtaaatgataaaaacagaatttttgatgtggaatgctacctagcataattctcaatgtaattttctttattgtggcatgaatgttcagatccaaatgattcaaaataaaagcttataagacataaaaatagtaatactcaaagcatactaacaaataatcatgtcctatcaaaataacatagccaaagaaagcttatccctacaaa

SEQ ID NO: 9125 - DNA, 350 bp, Triticum aestivum
  Clone ID: LIB104-060-Q1-E1-A4
gacggggggggattcaaccgcgatagcttcgcgatccgctcacgctatctgagatttggacgcgggtcatgcctgcagctcttgcccatatggctctcgttttgcattcacgcaccggcaacatgaatgccgtcaaggcacttattgctgcagactactgtgcggtcaaggtttagctccccatgaacttctagatgggtgtatcatacaaaatccctgaattcatcaagatgaacccccctggtaatgttcctgttcttgatactcttgatgctaatgtttttgagagcagtgctattacatgctatgttgctcgcccaaacggtgacaacctgttttagggtggtctc

SEQ ID NO: 9126 - DNA, 371 bp, Triticum aestivum
  Clone ID: LIB104-060-Q1-E1-A5
tgttgtgtcggtggaccatcgcaggattttgctctcgaggaaagaggccatcacaaagcaggtatacatttggattatcaagtaacagtgtgggtttacacatactcttggacaagtgccctcggattcataagactctcatgagaagaaagtaaagcctgtctgaagaagctgctgctgcctaatgtagataacatagccgttggttgggaagtctgcatcaaatcacattttcttattcaagggttgggaggagatggtgttgttttaattctttagttgttgatgatttctctttggccccagcaggggatggggatacttgtgccatgatccaaaaattgtcaatgtgggttttggggggttgcttt

SEQ ID NO: 9127 - DNA, 399 bp, Triticum aestivum
  Clone ID: LIB104-060-Q1-E1-A7
cgacgggcgcgcagcactgcggttggccccagtcgagcgttacgtcagacgggcgtaagattaggggaaagcaccgcgaggggaggaggcagcgtacctaggatggcgagggatggctgctgcgatgccatggccgactgcgcgagaaggtctcggcgaccggcggagagatcacaagcggagctgcggtggaggcggcggcgcggcgaggggactttgctggatgcgggtggtgcctatgtcatgccttcctcactgacacatgggggtcattggtttgtgggcctcagtttttgttagggaattgtgggccttagttcgtagctacagaaacgggataaaaacgtcggcaggctaataaatagattgcgctgcattcctgggaaatgggccagccca

SEQ ID NO: 9128 - DNA, 379 bp, Triticum aestivum
  Clone ID: LIB104-060-Q1-E1-A9
cgacggagcgaaaaaggaaaagcaagacggctccatacgccggcggcagaaagtggaagctgacaccaacgacgaccttctgtcggactcgatcaagattatcaacagtttcctgccgaggccggtctccagcatgcgtctgagtacggactcgagcagcccggattccgccgcgaagagcaatggcggctcgttcctcgatgggttcaagtccgtggtgcggaggtcaccgagcgcgccgagctttgcggactcggagaacggcgccggggcctccatgtggtcgagctccaagtggaccttcaaccacgagtccttcacccgtccgttgctcgatggcctgcccaagccctcgcccggccgcaggatgaaagctgct

SEQ ID NO: 9129 - DNA, 399 bp, Triticum aestivum
  Clone ID: LIB104-060-Q1-E1-B1
cgacgggcatgcatgttagcagaccatttcacaccactgatgtggcacgtgcgtcaagaatcgtacacgagctccccacacagatcacgatcagttcaggacgtgtcggtgcacgagccacttcgacgcattgggagggattcatgcgtacacatgcatgtgtgtgtgcgcaaacggtatcatgcatgtcatcccagagcatgacctatatatataccgtattacaagcaaaaaaatcccctcctaagtcaaattaacctctcttgttgtcaggcaaaaagtactgatggaccaagcgggcccacagatggaaagcatcgatatcgctgataacctcttaagtgggtgccagaggacaaccaccaccgctttgcatgtgggccgaacatatacatgttg

SEQ ID NO: 9130 - DNA, 386 bp, Triticum aestivum
  Clone ID: LIB104-060-Q1-E1-B3
gctcgacgggaagttacagaatgaggacggttcatggttcggatcatggggtatttgcttcacatacggcacgtggtttgctatagagggcctatcggcagttggacagtgttacaataatagcacctacatccggaagggttgccagtttctattatcaaagcagctaaggaatggtggatggggtgagagtcatctttcatccacaaccaaggcatacacgaacctagacggggagaaatcacatgtagtcaacaccgcatgggcaatgttggcactaatgaaagctggacaggccgaacgagatccgtctcctttgcacgaagctgcaagacttatcatgagcatgcaacttggcaatggtgacttcccacaggaggaaatga

SEQ ID NO: 9131 - DNA, 365 bp, Triticum aestivum
  Clone ID: LIB104-060-Q1-E1-B5
tcgacggagaggattacagactgttctgttttagagagattctgtttttgatgcatagtttgcttgttttgatgaaactatcgattcatatcagtgaattaagccatgaaaaatttatattacagtagacacaatgcaaaaacaaaatatgaattggttttcaagagtacttagagtagtgatttgcttcattatactaacggatcttaccgagttttttgttgaagttttgtgtggatgaagtgttcgataatcgagaatgtcttgatgtgagaagaaggaagagaggcaagagctcaagcttggggatgcccgaggcaccccaagtaaatattcaaggagactcaagcgtctaagcttgggga

SEQ ID NO: 9132 - DNA, 390 bp, Triticum aestivum
  Clone ID: LIB104-060-Q1-E1-B9
tcgacggaaggaaaattatactcatatcaaattcgtatttgaacaaataaactatggaattatgagtggcataatgtttagcttcaagggtggagtgctggtaatgcgatacatagcaagtacgcagattgtattccatgtaaaagattgtagtctatgtaaaagctggaaatgacactttctttctatataatgcagtgttcgttgcccacacatgatggaagagatcacccagagaaatactagtcactcaagtctacagttccagtattttgagacagggtgctccaccctaaaagaatattgagaaaatctggaaatgacactttctttctatacagcgcagtgttcgttgccgagatatagatggaagagattacacagagaaat

SEQ ID NO: 9133 - DNA, 411 bp, Triticum aestivum
  Clone ID: LIB104-060-Q1-E1-C1
cgacgggggctcactgaagatggaatagggtttttcccgcctagtcccatcccggtggtgcgtctagcatcattgatggacatgtggacgtgtgtctacggtgtatatgtctttggtggatttgcttatatcttgtagtcttccgtctacgttcgtgtgtcttcaagttggatccttgcgatatacgctactcttcatcgcggtggttgttgttctggtgcgttagtcctatgggttttagcacgtttacttcctgactgtctactgcaacaagttttggccagaaaaggcgatgacgacagtgcgccttcggttcgcttcaatgcttatagtcgtcgctaggtgatctgtgaatctagatgtattttttattacttttaatgtttgttgtactatcatgatagaataaaa

SEQ ID NO: 9134 - DNA, 398 bp, Triticum aestivum
  Clone ID: LIB104-060-Q1-E1-C11
caggtatcggaaaggaattccggcgtcgacggagatgtatagattggtcttgctgttgaaagacagaagagtcagtgacggaagcagtacagtttggtgtcgttcttatatcttgctgctgaatatcactactacttgccattagtgcgatgttgctgactttcaatttcttgtatcctggaaatgctttctaagtacataatatcatatgcaaaccttaaattgtgtgtgcaaaaaaaaaaaaaaaaaaaaaaaaaaaaaaaaaaaaaaaaaaaaaaaaacaaaaaaaaataaaaaataaataaaaaataaaaaaaaaaaataaaaaatcacaaaaatataattaaaaaggccgtcattataaaaaaatcatgtcagggaaaaagccaggggtaaac

SEQ ID NO: 9135 - DNA, 391 bp, Triticum aestivum
  Clone ID: LIB104-060-Q1-E1-C5
tcgacggggaacatggggccgtcacacttcaaatcccgggcaagagcgagaactggaggccaaaattcttcatagacagagacatctgcatgcttgcgggtaaatggttaagctttgtatttgacatccatcgtgcaggtcggcgacatcaggaacattgtaccggcaatgggtggggaaaggtccacattcatggtccatataggtcgtccataacctactcatcgaatgggtgttaaaagggttcgatccagccatgactctccggttggcgtggaaggaatgacaaatccagatgccgtttaggaatcgcaaaccgatggatgctcgcaaatggttggaggcaagtttgtccacggcaacggtctgtgttccgggacatgtgcctgtt

SEQ ID NO: 9136 - DNA, 388 bp, Triticum aestivum
  Clone ID: LIB104-060-Q1-E1-C7
tcgacgggacacactgtcatcttctgccaacaattggactccttccaacgggggcggccacgcttcaggctactcaaaggaggctgacccaaccacagcttgaaagctgaatcactaaccacaacatcaacatccaacctcttttgacatttgcaatcccagttttcacattaccatcctttcccacctctttttgcttgtggtgttttcggagtctgtagctatttagtactttctatgtcgtgggctaccagaggctccctagaggctgcaaattttgtcgctgagtagaaccaagggaaccgactgagggtgctcccagtttctcctgagcctatatgcgtgtattaactgaaggccgtggaaggcatacctcgtggggagccct

SEQ ID NO: 9137 - DNA, 320 bp, Triticum aestivum
  Clone ID: LIB104-060-Q1-E1-C9
tcgacggacaggtaccggccataatcgacaccgagatgacggggatggtctccatccgcgacctgcttcccgctgtggtcaccaagtacaaggatgagctgaaccagcgcagcacgaacatgtacgtgagtgttgacgacggcctgctctcgctcgccgtttcgccgaagtagatcaacgacttattatatgttaagatgccggatcagaccgtgtatcttcgcacacaccggacgcaaaacgcaaacatgtgtctcatacctcactcctgcttgggtaatgtttctttccgtggcctcgcgatcctccgcagcgttccc

SEQ ID NO: 9138 - DNA, 424 bp, Triticum aestivum
  Clone ID: LIB104-060-Q1-E1-D11
caggtatcggaatggaattccggcgtcgacgggacttagtgaatcttgattacagaaacttttcaacaaaaataattatcctcttgtataattccattgaattataaaaataatgtgccaaggtttgcctttaggatgtttacaatgcttgttggtttgtacggtgcaggacagaaactttggctgtagtgcgcaattttatattttttactggaacgtcaaacggttctgattctttttgcactgcctttctgtcaaattgtttattttcctaatttttgtagaatttttggggcacaaaaagtatggtgaatgttcagattgctacagactgttctgtttttgacagattccgtttttgatgcatagtttgcttgttttgatgaaactatcaatttctatcagtggattaagccatggaaaa

SEQ ID NO: 9139 - DNA, 385 bp, Triticum aestivum
  Clone ID: LIB104-060-Q1-E1-D2
tcgacggggaagtactctgcacatttcagaggccagtctcacttcttcggatatgaaggaaggtgcggcctccctaccaattttgattccagctattgctatgcattaggctatggtgctggtgctcttctccaatttggcaagacaggacttatttcgtcggttggtaacctggctgctcctgtggaagaatggactgttggaggaactgcactgactgcgttgatggatgttgagaggaggcatggcaagaacaagccagtgatcaagaaggctatggtggaacttgatgctgcgccatttaagaagtttgcctcgctgcgagatgaatgggccagcaagaaccgatacatcagccctggtcccatccaattcagcgggcctg

SEQ ID NO: 9140 - DNA, 179 bp, Triticum aestivum
  Clone ID: LIB104-060-Q1-E1-D3
cgacggggtcaaaaggaaggtagtacatttaagtgccgattttcatgtcttaccaaagcatccaagtcatcgttcagcgtcatgacatgcaaatcagcttcaatcttgatctctggactaaagtccggttgtcacggtaagataaaactgtactatattgattaatgcaaacatcaggg

SEQ ID NO: 9141 - DNA, 359 bp, Triticum aestivum
  Clone ID: LIB104-060-Q1-E1-D5
tcgacgggcgctttagttcgcagctggtcgggatgatcaaagcctgtatagtcgtgggggctaatccagatcgcttcgatcatgtcgtgtaagatcagctggcgggccgtcgtgtggtaaacttgtcagtgggagtcttcagacgtggcctctggtaagcctcttgcagcatagccatctttcgtcactcggagatggagcgatgtggtcaggttttataggacttccacgcagtcacgaacactgactggagacttagctgcatatagtccttgcggacctggcatagcagttgacgtgtttgacgctcagcctaaacagctcacttgcacaacatatcacgctgcactgctctcgtt

SEQ ID NO: 9142 - DNA, 393 bp, Triticum aestivum
  Clone ID: LIB104-060-Q1-E1-D7
tcgacgggagataacgcaactctggcaatggcgaggtcatgccttggagggtgcctgtaggtaatccggcacgtctgaacgatcgctactggcatctggtgcgccacgtacggtctatgcagggagtgggcatgtatgttccggcatgagtccacgctcacattagtagaatcaaagagccacacacactatggccgattgcattctgtaggaatactgccacgtcgtgctaacggccggagcagttggttgcaacctgaacggatggactcaactgttgatggaggttacgaacgtcaggactctaataatgcatttagcaaacaagtagtggctgaagggcctagtgaataggcgaaccggcggagcaattcatgcatatccgtgcttgca

SEQ ID NO: 9143 - DNA, 400 bp, Triticum aestivum
  Clone ID: LIB104-060-Q1-E1-D8
tcgacgggaagcaaacgtactgcagagacgccatggtgagaagactccccaacaccatttggccaaacggggcctttgtggagactgtcaaggtgtggcaataggagtggttctacatcactgaaccccgcaaggccaaatgggcggccagtcctgatttaacatacgatgccccctaagtgaatcacctcatggaccgccaatggtctggactatggatccgcagccaatctattgatgctgcaaaaatgcatcacaaacatgattaagaagaacacctgtctcactaacatgattcaggtgatgctcttctgccggattcttccctgccaactccgatcctcccacatgtgggagttcaatctggaatatcctccgacactaaagcacttcttcggca

SEQ ID NO: 9144 - DNA, 330 bp, Triticum aestivum
  Clone ID: LIB104-060-Q1-E1-D9
tcgacggagatgatgtttccatcgtagaatgcttgaaacatcctgtttatatcactgagggctcttatacaaacatcatggtgactactcctgatgacatgctcttagctgagcgtttgatgaacgataaatagggccaatattaacaatgtttacttgatttgagaggcacctgtatgaatttgtcagtacgacattccattgcctttccacagttttggcctcttgggaactagaaaagtaaacatgtagctcatacacgagatagataacctgtatgtaacattctttccgtggcaatgaatatatggcaaggttttctgtttgaaa

SEQ ID NO: 9145 - DNA, 386 bp, Triticum aestivum
  Clone ID: LIB104-060-Q1-E1-E1
cgacgccaagaaaggccactatcaatgtatcatcagtatcaatcactacatgacaccacacaacagatatgctgctgtcagcagtcctctctaaatagacactgcaattatcgtataagtacatcattgctgctgtcagcagtgctctctaaatagacactgcaattatcatgtacatcattgctgctgcaatgaaccattaagaattatttaaaatctagcctaccatctgcgttgtcgtcaacagagggttgaggcggagttacaaaatctgtatgagaaaccgagggattgtccgagtcagcgacatctttgttatcttcagagctgtcagaagcagctgagatggcgtcacctgattctgaatgtgttctgtccacatatgc

SEQ ID NO: 9146 - DNA, 251 bp, Triticum aestivum
  Clone ID: LIB104-060-Q1-E1-E2
ttgacagggttggtcgagatgagggatagtgtccggtcatcactagggtggaactgaaactatcactataggtagacatatgtgatgtgagcagtgcgcggtaaatcgatactgtaattatgatgtagctcagtgtagctgctgtgaacgtctcaacattggtttttatctatcctaccagctgcgttgtcttcaacagttggttaatgcggttttactcactgggtttaagtagcagaaggattttctta

SEQ ID NO: 9147 - DNA, 389 bp, Triticum aestivum
  Clone ID: LIB104-060-Q1-E1-E3
ggcatgtactgatgggtgctgttccattcccgagcgatgttttgcggctgcagaaccttggattttgtggtgtggtcacactaaacaaatcatatgaaaggcttgtttccaagtcactgtacgaggctcatgggattgaaaacctggtgctgccaactagagactacctttatgcgccgtcatttgacaacctttgcaaggctgctgacttcatccacagaaatgcttcatgtggtaagctgacttatgttcactgcaaagctggacggggacgtagcaccaccgttgttctttgctacttggtgcaatgcaaacaaatgacacctgctggagcttttgaacatgttcggtcatgcatgccaagggtgttattggcttccgcacaatgg

SEQ ID NO: 9148 - DNA, 396 bp, Triticum aestivum
  Clone ID: LIB104-060-Q1-E1-E4
cccggctcgacggggtgaaaagctacttcaacaagtccatcggcaggccggccagcaacaacagcagcaacaacaacttcagcggctacggcggcaagaagggcgctgccgacggcaagaagaagcacgccaagaacgagcgaggggacaacaaccatggcgcggcctcggagaagcggttcaagacgctgccggcgtccgaggcgctgccccggaacgagcccatcggcggctacatcttcgtctgcaacaacgacaccatggaggagaacctcaagaggcagctcttcgggttgccatccagatacagagattcagtgagggcgatcaggccggggctgcccctcttcctctacaactactccacccatcagctccacggcatcttcgaagctg

SEQ ID NO: 9149 - DNA, 386 bp, Triticum aestivum
  Clone ID: LIB104-060-Q1-E1-E5
cgacggggaagaaaggattaggaaggttcaggagctgaaggcgaaagcgaaggctgctttggagaacggcgggtcgtcgtgcatgaatctggacaagctggtccaatccgtcgtctgaaaattagcgcagcatgtcggcccagaataaattctgctgctttcgctcattgatggacatattggggctgtttcttgcttgattggaagatcaagactatgttgcaactgttgtttagctgcaactgtgtctcatgccaactcagtccacaagtctcttgtttagcgctgcctgcctcgtaaaaaaagataacgaatccggcaggtgctctaccatttgaataaggaaagtctagagaatgtttgcaaaaatcaacaattcaacaaaa

SEQ ID NO: 9150 - DNA, 387 bp, Triticum aestivum
  Clone ID: LIB104-060-Q1-E1-E6
cgacggggaacaacagaagatttgcctgatgacctcgtagaactttataagacagatcctgaagagaattatcatcagcgcaagacacggatccaacggattcgacgatattgggctgaacaatggttcaaatgcaagttcgtgacccaggaatatgctgagaagaatgctataaaaagtccttggggtgatattctctatcgaggccttcatcccaagaacagagctgaagctattgcacagggtttctatcactgtatggtccatggacctcagcctgaaaatgcctactcaacatcattgctctggtgtcgtgacgacaatctcttcaagcgtaactttcagcatgcaaaggcatcggccaaagaatacaagaagtcattggga

SEQ ID NO: 9151 - DNA, 299 bp, Triticum aestivum
  Clone ID: LIB104-060-Q1-E1-E8
tcgacggagtagaagagaccgagcacatgtaatacgcactgtcctggatgatgctccaattcttctcaccggggcatcaccagcaatgacgtctcgtcgtcgtaagagccaagcacaccgccgcgatctccttgggcctcactggagcatacgttgctctgtccgttgctgcggacctgaaccagacctcgctccgcgtcaacgatatgacaatgcagctcaacgcgcacgtgagcgataaagtcggtgacgtggtgcaacgcgatgtgatgatcgtcgtctacgaagcgatcgacagg

SEQ ID NO: 9152 - DNA, 86 bp, Triticum aestivum
  Clone ID: LIB104-060-Q1-E1-E9
tgccattcgatagctcggctattatgtaacaggccttcaattcattggccgtcgattaattgcgtagccagtgggaaaactgggac

SEQ ID NO: 9153 - DNA, 370 bp, Triticum aestivum
  Clone ID: LIB104-060-Q1-E1-F1
gggttgttgtagtggtggtggttgttgttgtggttgttgttgttgttgttgttgccttggttcaagactaatatctgcatcaaggcacactactagatttcccactataaccgagggtcaaattaccatcggatatttttgctcaccgtcggatttctgtataactgacggtacaccgtcggcaatctcccgtcggctatgcttggtcggccattaccataatagccgacggtactgtagggtaataccttctccgacggcaattacccgacggtgagccgtcggacatgttttggttaccagccgactcggataaacttgacgacacttatagctgagggttccccgttgggtatttattttctgatag

SEQ ID NO: 9154 - DNA, 383 bp, Triticum aestivum
  Clone ID: LIB104-060-Q1-E1-F12
cgacggacgccagcgcgcgcactgtccttgtttccactttggtgctaaggaagcaagcgcgggcgaggagttctgaggcatcaggcaaaggtttccatatcggcgcaacgagaccaagaccagcaggacggcaggacggaggtcactgtggagcccaagacggcatcaccaccagagcctttggcaggcgaagactacttttgtcaggataagctgtactagctgccccctttcaaattggccgttgtgggttcccttcccgctcaatatttgggaagaggaccggggcctctataaatagtactagccaccacagtagggggggatcgatctcatcttgagcaatcctcacccacacaagtccaccaagcacaagaacacct

SEQ ID NO: 9155 - DNA, 368 bp, Triticum aestivum
  Clone ID: LIB104-060-Q1-E1-F2
ggatgcaaataaatgaaattaagaaagttgaagcaggactatcagtaagagggaaggcttgaagttgaggcaactgtcttgtataacattttctgctttgtgtctgcaactgttttcttacttctaagcttatgttgtaagacacctgctgtaaacatttgagtgagatcgaattactggttcccatatgttctgatgtctattttataaatgtatacataaactgttgatgcacaatatttgatctgaaaataaagtaataccttcacaaaaagaaattaaccaacagtaaaaccgtcagacatgttttggttaccaaccgactcagataaaattgaccacacttatacctgagggttccccgttgg

SEQ ID NO: 9156 - DNA, 392 bp, Triticum aestivum
  Clone ID: LIB104-060-Q1-E1-F6
tcgacgggagacaggacacctttgcctctatcaaacccacaacttggaaagttttgaaagctgtaatgagacagcaatttttcctccttactatcgtcgtgaattgcgtcgcaaattggagaaattaaaacacggcagtaacactgttcatgcttactaccaagagttcaaatcttatatgcatcattgtgacatagaagaatccgaggatgatacaatgaatagattttttggtggtttgaaccatgatattcatgcaagatttcagtatattcctcgttgcattactgatatgtatgtccgtgcttgtacctttgagagacatatacaggaggatgcattgggtgactacaacaactattattccagttcatgctcaccaccgccggttg

SEQ ID NO: 9157 - DNA, 395 bp, Triticum aestivum
  Clone ID: LIB104-060-Q1-E1-F9
tcgacggaccacaaggggaaggggctgtttcagtggcaccatcacgactcgcacaccacactctcgctccacctgaggtggccatacgtcgccaacatggccatggctagatttgcaatgacctaattgttcctgtccaccactggaagaaacttgtcctggacgttgatccgtttgtcgtcaatgacgacgaacaccatcacgccccgactacatcgtcatttctccgcaaagtacaccgcttaaggacacaaccataaaacaacctttatgtaccagtcgcgggactctcacattatactttagtcccattcttcatattacactgttattcagcccttaacgacaagtcgtctcgactagtcatttttcacagtagacctccctctctctaa

SEQ ID NO: 9158 - DNA, 407 bp, Triticum aestivum
  Clone ID: LIB104-060-Q1-E1-G1
cccggctcgacgggatgcaaaggaagagagttagacttcgtcgttacatgatatatgctgctttgtgctcgctactaaattacaaataattgctaattaaaattggctttgatataccttgggatccgggtggattcactacttgagcactatatgcctagcttaatggctttaaagaaagcgctgccagggagataacccggaagttttagggagtcatttatttctgttgagtgctttcatatagtttaaaaataacaaaaataaagaggggaacccaaaactttttcaaaaaggaaagtgaaagtgagaaagacaagcattgttgaagtgggagagctccttgaactttgttcatgctcacggcaactttgtgaatcttgattacagaaacttttcaacaaaaa

SEQ ID NO: 9159 - DNA, 182 bp, Triticum aestivum
  Clone ID: LIB104-060-Q1-E1-G10
tgagtcgtattagaatgctgggatgtagcggatagataatgtatggaaacttcggacatgtttgttgatcataggatcattgatacgcagacttctccagttgatcgttcgatagcattcttactttttcaggagctatcatggcaagtggttggagctgttgatggtcttcgctactaatg

SEQ ID NO: 9160 - DNA, 394 bp, Triticum aestivum
  Clone ID: LIB104-060-Q1-E1-G12
cgacgggagctaaatcttccttctgctaatgaattgattagttctcagtcaaacaatgaggcaaatggaaatctggaaaacacacaggaagtgcaggtgaacccaacgagcttatctcaatacagggacatccagagaaagattgttgagtttatcagaaagagataccatattctggaaaaatgcttggacattgaatatgccgtgataaaaacaaatactcctgttcctgatgatcttactgaacaaaatgttcctatgggacatagcccagctgttccagatatcagtgaagtgttgagagaacttccccctcttgtaccaatttctgccaaagaagtggcttctgatggctcaactgaccaggcacacctttcccatctttacaacaaga

SEQ ID NO: 9161 - DNA, 363 bp, Triticum aestivum
  Clone ID: LIB104-060-Q1-E1-G2
cgacggggatttaggtatgtgcagtactttgatcccaacgatgcggcagacgcaaaatactacatggatggacaggtcattcttggtagagaagttgcagttgtttttgcacaggagaacagaaagaagcctgctgagatgagaactagagaaagtagcagaggtcggtcttacgatcggcggcactctccttccccaagggggcggccatcttaccgcggccgaagctactcaaggtctccatcacctcggcccgcaaggcggaggttcagagacgagtctccctcgcgctcccgctcgcccagcggatcgaggagtgcgagtccattggatgggaagtacggcaggtcctcacgaagagag

SEQ ID NO: 9162 - DNA, 273 bp, Triticum aestivum
  Clone ID: LIB104-060-Q1-E1-G3
tgatctactcttctacgatacatgagacatgctgctttgggttcacgactaaactagccattcttgctatataacatcggctttgttataccttgggatccggttggattcatgttcctgatgcactatgtgccaagcttcatggctttagacagatctctgccatagacatttcccggaagttatagggagtcatttatttccgtctactgctttcagactctttaagtcacaacatgcatgactatgggaccccaaaactttttccggtcg

SEQ ID NO: 9163 - DNA, 344 bp, Triticum aestivum
  Clone ID: LIB104-060-Q1-E1-G4
cgacggggcaagaggtgaggatctctggagccttgatgagctcttcatggcggctggtggttattgatggttcttgtcagtgtggtctgcggatagcacaaatgtcccttgcatgtggccaagatgaagaagtggtggtgcatgtggccaggatgaaggataggttgcatctgttatgcttggtagcggatcaaaccctagctatgctaaagactgtatgctgctagcagtggaaccgtatgtcatgtttataagtattttgttgttgtatatcgcctctatgattgggtgcatgttggagactggagtttaataaataaatacattggtcatatgcctgatgt

SEQ ID NO: 9164 - DNA, 409 bp, Triticum aestivum
  Clone ID: LIB104-060-Q1-E1-G5
ggaattccgccgtcgacgggacagcagtcagcacatgccataatgctccgagaaaatttgtggtcggcttacaaatgtttttctcggtatacgccatgaaaatcgaattcgaaatggtatgaccgtgcaagttgagcatgttttaatgtaattgtgtacatagatggctaattgtttccaagttgttttattttataatgtgtgtactccgcgactgagctgtacatttccttctgatcctgtattcatatgcgggcactatttgctccatcactaaatctgaaaaatcgtacggtcggtaggcggcgattggtcttgggaggcgtgggcctacgataaaaattgtggaggccacatgaaagtctgcgggggcaaatcgattggaatcagggttggcaaggattcaact

SEQ ID NO: 9165 - DNA, 397 bp, Triticum aestivum
  Clone ID: LIB104-060-Q1-E1-G6
cgacggggagtaaactccaagattgggccgcgagcgtgtcggcaatccaggacgcggacctccgacaagaattctttcgcatccaggcggagtttgcggaaatcatccatcaagatgtccttcgtacctcggggcagttctacctcagaaatcaaccgtccaacagtgacatcgacacaatgctacaaatgcaggatgacaacgcccgttctttcattactcccacgatagacggcggcttcatccacgctccggtcccttgagtcgagttgtctagttctgaaacatcaattggctcatgttgtaattaaactttaatgaacttgtagtatgtctctttggttttgagagtcgttcaacttagatgtaatcgatgctattaatgtcttgcttttct

SEQ ID NO: 9166 - DNA, 404 bp, Triticum aestivum
  Clone ID: LIB104-060-Q1-E1-G7
tcgacaagtggcaacgggtgatccgtatgatgattgtgatatcaagattaggagggtgaatgttagagctaatcttgatatttgtattagcatgtttgagttttgcatgtagtctagtctagtgtggtgttcgtccgacgaaggtttcaggtgagcgcgccaaggaggtgagatgccaggatgccgtgtgaggcggcgagcacggcgagatgccgatggtgctgcgtgagaagcggcaagacgtatcagaggctggagccgtgatggactgcatcaaattgggtcgggtgaaccggccggtcgttctgtttgttggactagctgttcatgcgtgagttcgtttagtcctagctgagagtatcgttgctagtagttgatgcatgcatgtagttggcctggtcaca

SEQ ID NO: 9167 - DNA, 415 bp, Triticum aestivum
  Clone ID: LIB104-060-Q1-E1-G8
cgacggagaccaagggaccggctggagggtgcggtccggcaggtggcgaggagttgtttcctggagggtctctgctaggattggacggctctatcgggagaggcttatcggagtccaattttcaccttttccgggccattgtttttggggatatggagggttgagtaagatggataacaaaagtccctagttccacaggaggcttctactcagcacactttgatagatgatcagctatgctgttttccgcatggggtatgtgctctatttgcaatccatcaaagtgttcctccaatcttgtcacttccttgacgtatgcctccatcaatgggctttggtaatctttgttgacttgtctcaccacgagctgtgaatctcctcaaatgatcagcttcttaattcccaattatgcggc

SEQ ID NO: 9168 - DNA, 343 bp, Triticum aestivum
  Clone ID: LIB104-060-Q1-E1-G9
gacggagaccaagggaccggctggagggtgcggtccggcaggtggcgacgagttgtttcctgcagggtctctgctaggattggacggctctatcgggagaggcttatcggagtccaattttcaccttttccgggccagtgtttttggggatatggagggttcagtaagatggatagcatgagtccctagttccacaggaggcttctagacagcacactttgataggtgatcagctatgctgtgttccgcatggggtccgtgctctatttgcactccatcagagtgttcctccaatcttgtcacttccgttgacgtatgcctccatcaataggctttggtcatc

SEQ ID NO: 9169 - DNA, 392 bp, Triticum aestivum
  Clone ID: LIB104-060-Q1-E1-H1
gggatgacattgcaagattctcggggaatgaactacgatagtaagctccaaaacatgagctggttctgctacaaacaggtgaacacgttgtcccagacaagcatgaccacgtggtagtcttacaataaaacactaccgagttctggttgggaaccatcaccgtggttaacgaagtccttgcataagtcatatgattagctcttatgaaggaacttcttctccttgaacaaatcaatcagtggcttggtgtgctcgggacacatatggaatgaaggttgcaagtctccagaccacagaatacttcgcacgtgtgcatgactgatttgggatgattccaaggaaacaaaacaatcttcctcgaattcatggcggcaacttgcatcagatgcaca

SEQ ID NO: 9170 - DNA, 377 bp, Triticum aestivum
  Clone ID: LIB104-060-Q1-E1-H10
tcgacgagggggaaatatgaccttatatgcaattggctcggaaactcaaggtgggtccactccatggaatggtctggtcagaaagactttgccaaaactgctgaatcatcgtttttagtagacgatgcccaagctggagtcttgaagagccacggggcactcagcttcctcaaggttcacaatgctggccacatggttccgatggaccaaccgaaggccgcccttgaaatgctgaggagattcacccaggggaaactcaaggaggcggttcctgaagaagagtcatctacgaccacgttttacaccgcgatgtgatcgtcaacaccgaccaaaaagggaaaagaaactggctaggtagcctgcacgcgtcgcccttg

SEQ ID NO: 9171 - DNA, 241 bp, Triticum aestivum
  Clone ID: LIB104-060-Q1-E1-H12
cgctctttacgattgatgtgaaagatggaggtactgatactacagtcatgcgagttgggtgattatgaattcaaagacagcttgtgttgaagttagtgactcccgtagcaagcacgtatggttaaaggtgtgtaacacctttgagacatgaagtgtacttggcttgtgcatccatattagtaagagtcggagactagtgatggccctttcctaccactctatccccccagaagcaagcctg

SEQ ID NO: 9172 - DNA, 390 bp, Triticum aestivum
  Clone ID: LIB104-060-Q1-E1-H2
acttggaggatcatgaaatatgttcctatgatgagcatgtccaaaacttggaggaactgtccaccattgatattactgacgaaaggtcgcgtgatgatgtggcaacattgctgtttaggtcgaagaagctaaggatgcttggtgtgagagctaatagaggtggcaatacacatggtgttatacctttccttaatgagctccgaaaatataacctcgagtcactcatcattgaaagtgacctgtgcggtctggatgaatgggagccatggcctgagctccgaagatttgaactgacaaaactcctcccacgggttccagagagttgggcctcactggacagcctcacccacttggattttgcaattcgtaaaatccaagcaacggatgttc

SEQ ID NO: 9173 - DNA, 367 bp, Triticum aestivum
  Clone ID: LIB104-060-Q1-E1-H5
cgacgggaatgagacatctccccaggactagtgaagttgcttaagaacaagctctgcaggagatacctttggtcttcagtttcaaagacagtacactttcctgcgataactcaggcatcaccatcaggccttcttgtctcttaggtttcaggacctaccactttgtggatcatcactgtgcataagcccatgggctggggctgacacgagacattcatcccatggatcaaaacaggctgtgattgtctgtgtgcagaacacataagtgtgtaacgtttataatctcaacacaacacaatatatcgcacatgtgcagtcatgagtttggatgtgtccacggaaatagaacattcttcctcgatttcat

SEQ ID NO: 9174 - DNA, 361 bp, Triticum aestivum
  Clone ID: LIB104-060-Q1-E1-H6
cgacggacggaacatgatgctggtgacgagaatggtacagagttgatatgagtttcagaccaaaggaaggatcaagcaattgaacgcacatttaaaggacttgcaaggcacttccgcgaaatgttctctgaactggtgcaaggtggcaacggagacctggttacgacgacgaagtaggatggtgatgctggcgatgatgacatgaatgaggacgcgcctcgtgaagcatatcctgaagggaggatagagagatacactggtatgaaggtcaaggttaccatcactggcagaggagatactcagtcgataaatcatttgtctggacgacagaagacggtggtggcattaacactgatcctcg

SEQ ID NO: 9175 - DNA, 381 bp, Triticum aestivum
  Clone ID: LIB104-060-Q1-E1-H8
gatcttggaaatgtggcagctggagcggatggtgttgctaacatcaatgttactgactgccatatcccccttactggaccaaattcaattgttggccgtgctgttgtcgtccacggtgacgctgatgatcttggcaagggtggacatgagcttagcaagagcactggaaacgctggtgcgcgtgttgcttgcggaatcatcgggctccagggctaagatgtcatctccaccggccaacgtcgtacagatctgggaaccttttcagaatgcagatttgcaatctctattctaaataagcacatgatctttgatcacttgttagtgtgcaccattcgtgtgaattcctatgtgctactctgaactttaccactgtcatttggc

SEQ ID NO: 9176 - DNA, 359 bp, Triticum aestivum
  Clone ID: LIB104-061-Q1-E1-A10
ccgggtcgacgggccggcgtagtcatcggctccggcatgggcggcatcacggcgctctccgatggcatcgcgagcctggtgaccaaggggtgcgggaagatatctcccctgtgcatcccgcacgccataaccaacatcagctccgccttggtcgccatggacgctgccgacggcttcctaggcccgaacttctcgatctccaccgcgtgtgccacctccaaccactgcttcaacagcgccgcggaccagatccgactgggccgagccgacgtcatgatcgccggtggcaccgaagctggcatcatcccgatcgccctcggcgcgttcttcgcgtgcagggcgctgtcgcagaggaacga

SEQ ID NO: 9177 - DNA, 420 bp, Triticum aestivum
  Clone ID: LIB104-061-Q1-E1-A2
ttcatggaagagaagctaaagcattacccagccaccgtcaacgatgaagggatgtatgcccattcaaaggaagtggccgaggccatgctcggggaagctaatgtgaaggtggctccccggagcatgggtggcgaggacttcgctttctacgcgcagagagcggcgggtgcattcttcttcatcggcgtaggtaacgagaccgccatggacagggtgcatccggtgcactccccgcatttcgtcctcgatgagggtgttcttcctattggagctgcgtttcacaccgcggttgccattgagtacctgaaccgctcctgaaaactacaggagcatgagtgaaggtccgtcttggattatggagtgaaaattctccgatgtccgtatagtgttagatatccaaaatcgtcttcatttgcttga

SEQ ID NO: 9178 - DNA, 397 bp, Triticum aestivum
  Clone ID: LIB104-061-Q1-E1-A3
cttgctgtacacaccttttgggagaatcccacttgattggaatttattagaatactctatgtgcttcacttatatcttttgagctagatagtttttgctctagtgcttcacttatatcttttagagcacgacagtggcttaattttgtagaaattgctagtctctcatgattcacttatattattttgagagtctcttagaacaacatggtatttgctttggttataaaattggtcctagaatggtaggtatccaagttgggtataataaaaactatcataggaagtgaattggatgctatgatcaatttgatacttgataattgttttgagatatggatgtagtgatattaaagtcatgctagttgggtgattatgaatttaaagaatgcttgtgt

SEQ ID NO: 9179 - DNA, 376 bp, Triticum aestivum
  Clone ID: LIB104-061-Q1-E1-A4
gcatggagacagcaggacggcaaggttggggaaaggcccgcccaaggaaaacggataacccatttttggcaaaatgcttcaacaaccgttggaattggctacaaacggcatcaaatacagctgcaacaggagtcatgttttgcaacaatgcaaaaacggggtcgagtttttgttacaactggcgtcgcattttgctacaaatgttatcattttttgctacataagtccaccgttgagttgtgagttgccatgatggctataagcagtggcgacgccgaactgtggtcgtccggcggcgacaatgatagctccttggaagctccgcctcccagctgggactggaaatccaatggcgccgtcacaccggtcaaatccc

SEQ ID NO: 9180 - DNA, 392 bp, Triticum aestivum
  Clone ID: LIB104-061-Q1-E1-A6
tcgacgggaaatagaacacaaaaaaaaatacaaaaagagtaaataaaaatacattacaaaagaaaatgtacaaatcaatattcaattaacggaaattggaaatctaatatttccttccttcaaaataaataattgcaccagtcattctaaggaaaggtcttccaagaataataggacatgaaggattgcaatctatgtcaggaacactaaggtctacgggcacataattcctattttcagcaataagattatcattaattcttcccatagatttcttaatagtggaatccgcaaggtgcaagtttagagagcaatcatcaaaatcacggaaacctatcaaatcacataaagtccttggaattgtggaaacactagcacccatttcacacaaa

SEQ ID NO: 9181 - DNA, 207 bp, Triticum aestivum
  Clone ID: LIB104-061-Q1-E1-A9
gtaaccttcgggcgttgaaagtttggttccttaggctggcaacgtgaacatcaagcgttgctgaatatgtgcctgcggctgctgttgtatgtactagccacacatgataattatatgggatgttccagaaagaaaaaaaaggaaaggaaagcagtccgacaaggtgatataaacaaagcgaaaatcacaataatactgcaacaaaaa

SEQ ID NO: 9182 - DNA, 388 bp, Triticum aestivum
  unsure at all n locations
  Clone ID: LIB104-061-Q1-E1-B1
gggtgataagtaagatgattgtgatatcaagattaggagggtgaatgttagagctaatcttgatatttgtattagcatgtttgagttttgcatgtagtctagtctagtgtggtgttcgtccgacgaaggctttaggtgagcgcgccaaagaggtgagatgccaggatgccgtgtgaggcggcgagcacggcgagatgccgatggtgctgcgtgagaagcggcaagacgtatcagaggctggagccgtgatggactgcatcaaattgggtcgggtgaaccggccggtcgttctgtttgttggactagctgttcatgcgtgagttcgtttagtcctagccgagagtatcgttgctagtagttgatgcatgcatgtanttggcctggtcac

SEQ ID NO: 9183 - DNA, 396 bp, Triticum aestivum
  unsure at all n locations
  Clone ID: LIB104-061-Q1-E1-B2
taaattccccaactccaaaaacctggaaccaaacacggtggaattggtaccgccgcaccgccggctattacctcgctgctcggagcaaggcttgacggcggtattcctcccccagcatgagatccatcctccgtgtggcgtcctgctgcgtctcatcgaacgccaggacccgcgtggagcgatgcttgacctcgtaagggagaaccgcttctgctccatagatgaggaagaacggcgtttctcctgttggcttggtcgcggcggtgcggatggaccacagcacggactgcagctcgtcgagccagcccctgctgtaggcctcgagcttcttcttgaaggttcgggtcttgaggccccttangactttcgcattggccctctcagcctgcccattac

SEQ ID NO: 9184 - DNA, 372 bp, Triticum aestivum
  Clone ID: LIB104-061-Q1-E1-B3
caataaggtaacggtcccttaaaaaaacgttaaacggcaaaatacaagggtaatttcaaaaattccttcccattgtatttgcaatggccttttcccattgtataaaatttggcactctccatcgcatctccaaaggacaaggtctgttgtaacgatcttctctgattttacttagcactctccatcgcgtttctttggacaagtttagttgcacgtcaccggcctctaccaaccacatatagttcttttccctcagtcactggagccaacacaagacatggaagcacaagaggacttaaggtcaggtcggctccggtatatgggagcggcgtcaactgtgcgttggcagcttgttctcgcaacggcaatggt

SEQ ID NO: 9185 - DNA, 393 bp, Triticum aestivum
  Clone ID: LIB104-061-Q1-E1-B5
cgacgggaggtatgagccatacagaacatggaatacagtagttttaacagcaatataaataaagaatgagttcattaagtaccttatgtggtgggttttctttcttgcactaacggagcttatgagatttcctgttgagttttgtgttgtgaagttttcaagttttgggtaaagatttgatggtctatggaataaggagtggcaagatcctaaacttggggatgcccatggcaccccaggatattcaagaatagccaaaagcctaacattggggatgccccggaaggcatcccctctttcgtcttcgtttatcgagtgattttacttggatctacacttttactctccacctgatatgtgttttaacctggaacgtcctgtacgatatcagtc

SEQ ID NO: 9186 - DNA, 370 bp, Triticum aestivum
  Clone ID: LIB104-061-Q1-E1-B7
tcgacctcagcgaccgaggtgcagcgcatgatggcggagatcgacaccgacggtgacggcttcatcgacttcagcgagttcatctccttctgcaacgccgaccccgggctcatgaaggaggtcgccaaggtcttctgaatcagttcatttcacctcacccgtccgatccaggagccgatccatcgacgtatggcttcgtatatcaatttcatgcaactacctactctggtcccgatccagcctcagcttcacctgaggccggccctaattttgtttgatcactttttgtgctaccagtagtaactagtgatgatcactgttccatcatttatttattttacatcatcacaagtatcgtttctttctcaaa

SEQ ID NO: 9187 - DNA, 397 bp, Triticum aestivum
  Clone ID: LIB104-061-Q1-E1-B8
cgacgccggcatacgggagctttgggccaccggctggctgcatgaccgcatacgtgtcgtcgtctcaagcttcttcgtcaaggttctccagctgccatggcgctgggggatgaagtacttctgggacaccttgctggacgccgaccttgagagcgacgcgttgggctggcagtacatctccgggtctctgcctgatggccgtgagctcgaccgcattgacaacccgcagtttgaaggctacaagttcgacccatacggggagtacgtccggcgatggctgccggagctggcgaggctaccaacggaatggatacaccacccctgggatgcacccgagtctgtgctgcaggctgcaggaattgagctaggttccaattaccctctccccattgttgag

SEQ ID NO: 9188 - DNA, 316 bp, Triticum aestivum
  Clone ID: LIB104-061-Q1-E1-B9
ttccaaagccatcacgcaggaggtcggcattgaacttacacaagttcaggttctcaacaccttccagttccgccggcacggcataaaattcaggacaaggagttgccgcgtcataattccaagggaaaaaacagcacaatagctgtcagtgactagcttgcacatgacatcggagcacaaagattgaaggaaaaataatgtagtaaagatagatcattcaccaggatggggaagcatttgttgctcgggcgaacacaattggtcagcgcgaaatggctgagatgaggtacatgagtagctccaacttgaaaacatc

SEQ ID NO: 9189 - DNA, 403 bp, Triticum aestivum
  Clone ID: LIB104-061-Q1-E1-C1
ggttctaatataaagttttaaaaacaaaaataaataaagaggggaacttaaaactttacaaaagtaaaagtgaacatgagaaggacgaacaccattggagtgggggatatcctgaacttgttcatgcccatgggaactttgtgaatcttgaattacagaaactttttaacaaaataattatacccttgtacaaattcattttattataagtttatgtgccaaggtttgactttaggatgattagattgcttgttggtatgtgcggtgcaaaaacagaaactttggctgtagtgcgtgattttacattttttactggaatgtcaaaagtttctgaactttttacacaatactgctatgcaattttttttattttgccctattttttcagaatttttggagttat

SEQ ID NO: 9190 - DNA, 163 bp, Triticum aestivum
  Clone ID: LIB104-061-Q1-E1-C10
acacagcgatcgcaagagctgtagtacgtacgtaagtgtagcttagcctcctctgcacgccatggcgatgctgaacaagaacacgggctccctcagcttcttcgtggccgccctcatggtggtcatggctgccatccttctcctcttctcgttcgacgccctc

SEQ ID NO: 9191 - DNA, 319 bp, Triticum aestivum
  Clone ID: LIB104-061-Q1-E1-C12
gcacgagcccgtcaataggatgcgcatctcgaggacctgatcgcagtgtgaatggtccatggagtcccacactgcgagagcatcagatccagcgaatcacacatgtcacgtacgatgcagcgctcataatgatgtgagtcattggcgacacgacgtgatcatcacgagttcacactactcgtgatacgacctccaaaggcatcatccagggtggcgtacttggcatgatcagcattagacactcgcgacttcagattagggcgtgagcctatgcagataacatccattgcagcgtatagtccggtggcgtgagactgtg

SEQ ID NO: 9192 - DNA, 425 bp, Triticum aestivum
  Clone ID: LIB104-061-Q1-E1-C4
cgacgggaactaagtaaaaaatgttaatcatgtattaaaaatatattaaacatgtatataaataatattcatgatgtataaaaaaatgtacaatgtgtatgcaagaaatagacttaaaaatatgtattaaaaatgttaatattgtaatacaaaatttttaaatgtatgtattagaaatattcctgatatatacaaaaatgtaaaatgtgtatgaaaaaaagttcacataacaaatatttctttgaaaaaaatgttagtcatgtgtttaaaaaatgttcaacgtgtataaaaaatgtttcttatttagggaaaattttaagtgggtataataatgttcctattctatacgaaaagggacaggatcaaccgatggaaaccaataagagaaagaaataaaaattaaggaaacctaaaaaaaaacaagg

SEQ ID NO: 9193 - DNA, 423 bp, Triticum aestivum
  Clone ID: LIB104-061-Q1-E1-C5
tcgacggagcacagtacctgcgcaaggtggacctgcggacgtacggggggtacggggagctgcgggccgcgctggacgcgctcttcggctgcttctcctcctgctccggcccctcgccggacaacggccagttcgccatggcgtacgaggacaaggacggcgacctcatgctcgccggcgacgtcccgtgggacatgttcatctcctcctgcaagaggctgaggataatgagaagctccgaagcacgatgatgacgatgatgaaaaggacccgatcaagcacacatacatacatgaagcaatctggagatgatggaaaccggccgtggcacatgatcaggagaaggacgcacgcatgggccagatgcatgatcaggccatgggtgaacggcgaacggaggccgggttacccgggcacgcgcct

SEQ ID NO: 9194 - DNA, 210 bp, Triticum aestivum
  Clone ID: LIB104-061-Q1-E1-C7
cgacgggaatgaagctacaaatgtactgtggtgatgcagattctgatgcaatacacaacaggcaggcaatgagcatatgtgtgtaggtcccagttgagtaacctttacacaccttcccctatatgagcacatcaaagataatcatatacagactcgaaagtctagtagccgaccacgtaaaattattctgtaacagatctgcgtactgcg

SEQ ID NO: 9195 - DNA, 387 bp, Triticum aestivum
  Clone ID: LIB104-061-Q1-E1-C8
cgacgggaatcagatactcagatgctcaggagcaccaacagatggcccaatggaacaatttaaacaatctaggtctcattctgcatgatggaatttctataaccattggaaccctatctatccttgaccacaattggtgtccatcaatttcacgatcctacatcgccaccgtgtcagtaggagcatgcaatctcttttctcacgtgacacagggttcagtagccaccgagtggcgaccatcgatacacttcgagaccatatattttgccgacatcacatgtgtacctttgaggaaaatcattttgtgatagtctaatatgagaataaatccctgggtcatccaaagacagagacccttttgtacagcaactgtcacgaattctggcc

SEQ ID NO: 9196 - DNA, 211 bp, Triticum aestivum
  Clone ID: LIB104-061-Q1-E1-D10
gcggtggaatgaatcctttgcagacgacttagatacgccacggggcattgtcagtggcagagtggccttgctgcgacgatccactgagcattcagccccagcgtctcacaggattcagtctaaggaaacgagaggccgagcattgtactacactttgtgagccacttctgaaaagtgtacattgaactgtcacgcatgatactgtgggcct

SEQ ID NO: 9197 - DNA, 392 bp, Triticum aestivum
  Clone ID: LIB104-061-Q1-E1-D11
taatgggtgacactaacgatactgaagattagtttcaacgtggatcccttcgggaaggagaattacaaacttaaaaattaatctcattaggtgtttttgagagaaatgaactgcgtgatgacaacagcatgcttcgcaatgaaatcctggagcttcagaacaagcttagaatgcgtctgcagagcaaccctatttggagccaggatactactacaagatcagccgttgcagtaccttatcccacaagcggagtgttcccagtacatcattcgccacattcaccagtcatcacctcgacagcactttctctgcatcccgtaatcactgagcaatgctatgctgccccaccacgagagctgcagctcttcccgggaagcttcatcttcatccac

SEQ ID NO: 9198 - DNA, 375 bp, Triticum aestivum
  Clone ID: LIB104-061-Q1-E1-D12
gtaccaggggcaccacaaagcaaccgtctgctgcgccctccatgacggggctgaatcggcaccctcataagcaacaccgccgcgacgcggcatggttctgtacatatctctgtcgattcgaacaacgcagcagggtgctctgctagattttcagcgccgtggcggctcgaggacaggcggttttaagatttgatttgctgtagtgctaggaccatgtgtaacaatgtacttatatgcagtgcagcctttgggggctgcgcacaggtgatttgtatggttgcttacattgttggatatttatttgtgcacaaccgaaataatatgcacccaccgccattggttccgcttggtaaatgccagccagaaatttgttcg

SEQ ID NO: 9199 - DNA, 329 bp, Triticum aestivum
  Clone ID: LIB104-061-Q1-E1-D2
gggggcgaagcagagatgcgtgcggccggttctgcaacgatgccaccaacattgcatccgtcgatgcttgatcatgtatgagcatgcgctgaggtcccgatcgtcttcccagtggcttaccttcttcgtcgttgctgctgcctcagccgttatctagttcttgctttagctatgatgtgctaggctttgcttccaactactgtatgctgtgtctgaagtgttgtgtgggtgctctgcttttactttcagatcttgcacgatccttttgaggtgctgggctggggttcgtcgtaatccccggtcatgttagatagtatgtcgtgtgcggg

SEQ ID NO: 9200 - DNA, 322 bp, Triticum aestivum
  Clone ID: LIB104-061-Q1-E1-D3
gggcacacagagaagaaggacaagaagaagaagaaggacaagaagcacggcgagggccacaaggacgacgacggccacggcagcagcagcagcgacagcgacagcgactgagccagctccggccgcgtgcagtgcaggggagatgaacgcgtgggttaatttggagcgtgtggtagcatatgtatgtaatgcttgacatgtctcatggatcttgtaatgtaataaccggctgcactgcatggtgcttgtaataataacgttaaggaatttccattggtaatttggtaccatccttttttccaagctttttgtgtatgtatgt

SEQ ID NO: 9201 - DNA, 346 bp, Triticum aestivum
  Clone ID: LIB104-061-Q1-E1-D4
aagggcttcaagttccttgcccccctccttctcctggtcctcctccaaaacaacggccccaattgaacaacctaaggccttcaattgcggcaccccttgcccgtaccggtgcagcaagtcgagccggccgaatttgtgcaacagggcgtgcaacacgtgctgccggcgatgcgactgcgtgccgcccggcaccgccggcaacgaggacgtctgcccctgctacgcccacatgaccacgcacgacggccgccacaagtgcccatgattcaaccgccttctcgacggccggtcgaggctaatgcatactagatcatggcgtctcagtaaatatcccatcaagctagct

SEQ ID NO: 9202 - DNA, 391 bp, Triticum aestivum
  Clone ID: LIB104-061-Q1-E1-D5
tcgaccggaaagtatgtccctagtcccggctgaagaatgtatttagtcatttagtgtcgatgcaaggcagtaaccatttcttgtcttcatcctcgtattgtatagcatatagaggtacaagggagagagagagagagagagagagagagttacactgtaacaacatacatttgggatcctatctatcagggcgcgggcacgtagtcatactgcatggatagggacgtgcgtttagcatccaggagaagttgttttcagcataaaaatattcagtctaacaccgatgaccacgacaacaatgtccttctcttcttcccctacttctcttgggcgtcatcatcggcggctggcgagcacggctgagtgatatatggtcacgggctcacggcct

SEQ ID NO: 9203 - DNA, 394 bp, Triticum aestivum
  Clone ID: LIB104-061-Q1-E1-D7
cgacgccatggaactaacccgccctttcttgcgcctggcatgtggcggcgaggaactggggacaccataccgggacacatccggcgagtggtgtcggcacgaggacgatgattccgaagatcttgagccctggcagttggacggtgagccggtatccgacgcggaaaccaccaatgaggagtaatgcagcaacttggccctatgctgccgtgtgccatgtttgcttgccccagaatgatcgaaacagctctcatcagtcgtgtgttggtctcttgttgtattaccggataagctatattttcttgccgttatctttcctcatgtgcccgttccgtgtgcatatggcatcctgtttgttgttacattgtgctatatatgctgtagtattcagatt

SEQ ID NO: 9204 - DNA, 352 bp, Triticum aestivum
  Clone ID: LIB104-061-Q1-E1-D8
cgacgggggaggggtactacatcaggtccgggatcgtggtgatccagaagaacgcgaccatcaaggacggcaccgtcgtgtatagcaccgccgggtcggcgtgacgggttctgcgacaacctctgcgctgcgttgatcgtcgtcgtcgtctcgaggcccgggagggactgaagaagtgacccggggacgggaggcgtttgaagcttgaatgactgagaaggcgcgcgcgggcagcattagtagtaagtagtagtaaggagcagtggaacaaagtaatagtcgttcgtttttcccctgtaataaataagaggctgtgtgttgaggtaaagaagtggcagcgagcaaacaaact

SEQ ID NO: 9205 - DNA, 328 bp, Triticum aestivum
  Clone ID: LIB104-061-Q1-E1-D9
gactaatagattagtgatgagagcacgtgcgtttctgaaatttttgtaaatctcgtttttctctagtccttccttgtcaaactgtcaccgtgtcagcatcagcattagtcctactagtactacgataatcctccttacagtttccaatttgtggtcccaattgtaaaatgccgttctcctgttctgttcaccaattttaagcacagaacgtcataatgatactctcatactgttgctttgggacaagtataacatcttctgaaatgtcaatcttgttcgattcacagccattatatgatgaatataatttcagatatcaccatggcat

SEQ ID NO: 9206 - DNA, 368 bp, Triticum aestivum
  Clone ID: LIB104-061-Q1-E1-E1
ggggatcaaaagaagattaacatgtcaacatttcgcaaggtgttcggtaactcagacttcctcatcagatcaatctcgattgccgagttccaagggcgcccgcttgctgatcagcctgctgtcaataatggccgtcctcctggtgctcgcaatgtcccccgtgaccttcaccaaggctcaatggtcgccgatgctatcagtgtcatctcatgctggtatgaagacaacacagagtggggtcagcgtatccgatggatttatggctcagtcacagacgatgttgtcacacggtaccggatgcagaaccgtgggtggaagtcagtctactgtgtcaccaatcgtgacaccttccactgtactgcaaccat

SEQ ID NO: 9207 - DNA, 274 bp, Triticum aestivum
  Clone ID: LIB104-061-Q1-E1-E10
gtcacttaagacttttgagcttgatagtttttgctctagtgcttcacttatatcttttagagcacggaggtgtcttaattttgaagaaattgctagtctctcatgcttcacttatatcattttgagagtcttttattacatcatggtatttgctatggttacaaaattggtcctacaatgatgagcatccatgttgggtattgtaaaaactaccacaggatgtgaattggatcccacgatcgatttgatgcttgacgattgttttgaggtatgg

SEQ ID NO: 9208 - DNA, 391 bp, Triticum aestivum
  unsure at all n locations
  Clone ID: LIB104-061-Q1-E1-E11
gacctctagtacaccgatggttatctcggcaaagatcagaaggttgtcgtcgcccagttgtgcgtgcaccatcatgtcctcatcttccactactgcatggccacaaagccttgtgaccgtttcgccaggtttgtcagcaacaccgactacacgttctctacggtggaaacctgcaacgatgtaaaggcgctcaaggttacaggcttggcctgcaaaaaccttgtcgaaatccgtgagcactatagggtctggggcagcttgaagaaggactcactggttgaactcgcctcggccatcatcgacncctactatgacaagatgaagcaggatgccaagagaacaaatcctgtatcctggcacggggcctaaacgcggcaactagatgaaactc

SEQ ID NO: 9209 - DNA, 220 bp, Triticum aestivum
  Clone ID: LIB104-061-Q1-E1-E12
agaatcaaagaattctagctcattggatcatagacttctagcttattggagctagttatacgtcgatagcttgttatttttttattctatatttgtgttacctgatgcgaactatttctgattgtaaacctgatgtgaaccatgtttgatcgcaatgtgccaggtttggctcttttaaaaaaaaaaaaaaaaaaaaaaaaaaaaaaaacaaaaagatcaa

SEQ ID NO: 9210 - DNA, 385 bp, Triticum aestivum
  Clone ID: LIB104-061-Q1-E1-E3
ggggggattcagtaacctcccggtactccggcaaaatcccaatttcacccggaaaacttccaatatccaaacataggcttcaaatatatcaaccttaatgtctcaaccattttgagactcctcgtcatgtccgtgatcacatccgggactccgagcaaacttcggtacatcacaatgcatagactcacaatataactgtcatcgtaaccttaagcgtgcggaccctacgggttcgagaacaatgtacacatgaccgagacacgtctccggtcaataaccattagcgtgacctgaatgcccatattgtctcctacatattctacgaagatctttatcggtcagaccgcataacaacatacgttgttccctttgtcatccgtatgtt

SEQ ID NO: 9211 - DNA, 423 bp, Triticum aestivum
  Clone ID: LIB104-061-Q1-E1-E4
gggaactactgtacttcatcagaatcaaaccctttgcaccacattgattatttgccaaaaattgaaccaaatcgcaggaacttctctagtccttgggaagcaaacagttcacaatctctgcttgatgacattcgggaccagcatggttgcttttcttctgttcaagctcagagaaactctactccatgcctttttgcagatggaaacaatttccaacaagcagaaagtgtcaacagcaatatcaagcacatgtgcagtataagtcctcgttagaatgtcattctattctgttggtggcgtgttggatcgaccataagtagcaaggacatgcgcttcttaccacactttaatatcctgccagtaactgtgataatgctctacgctggcaccaagtacccaactgaaaatacctggccattgtgc

SEQ ID NO: 9212 - DNA, 379 bp, Triticum aestivum
  Clone ID: LIB104-061-Q1-E1-E7
tcgacgggaggtcatccccattgcggcgaagaagtgtgcaatctccgactgggaacccctctcctccaaggttgcgaatagggtctgcccgtggaggggccgctttatgtcttcaggggcaagactaatcctaaccaactccagcctctcttctctgcccatgtttaccatgggcctgttcttgctggcggacggggtacactctaagtttgacacaccatggtcccgtttcttttgggaaggagcgggaccaaaacggaaataccatatggttaaatggcaggccgtgtgtcttcctaaagcccggggggtcttgggatcatcaactccaagttgatgaacatcgcactaatgtgcaagtggatctggaaaatgactc

SEQ ID NO: 9213 - DNA, 224 bp, Triticum aestivum
  Clone ID: LIB104-061-Q1-E1-E8
tcgacggagagcaggtacaagatggggtcaagcctcaggccgggaactcctccatggccatcatctgcgagtcccacgtctccgccttgctctgcacgctcatcgtcgcgctcggcccaatccagttcggcttcaccggcggcttctcctccccgacgcaggacgccatcacccgcgacctcggcctctccatctccgagttctccgtgttcggctcgctctcc

SEQ ID NO: 9214 - DNA, 362 bp, Triticum aestivum
  Clone ID: LIB104-061-Q1-E1-E9
tgatgagatcgaaagtatgttaggaaggagagaaaatcctggggagcatgaagccatgcgcaagatgaaaaatgaatttatggtaaattgggacgggttgcgaacgaaagataaagaacgtgtactggttcttggtgccacaaatagaccttttgacctggacgaggctgtgattaggaggttcccccgcaggctaatggtaaatttacctgacgcatcaaatatagagaaaattttgaaagtaattttagcacaagaagagttgggacaagatactgatctggagtcacttgctaatatgactgatggatattcaggaaatgacctgaagaatctatgtgtaactgcagcccactacccca

SEQ ID NO: 9215 - DNA, 218 bp, Triticum aestivum
  Clone ID: LIB104-061-Q1-E1-F11
ggggctaatagaaggggagaaggctccagaaaaacggtaacaacccgggttacctttggaacatgcccacaaccttaaaaaccccaaaagaaggaagggttccagcacaaacaaccactgaacccgcgcattgcacacaaagcccttgcacagacacaccattgtcttggtcaccatgtccaatggcatgtattggtggacattggttgtaaattgtt

SEQ ID NO: 9216 - DNA, 379 bp, Triticum aestivum
  Clone ID: LIB104-061-Q1-E1-F12
gggagggagctgcaagcaaggagtgaaggtttcaacttggaaaggaaggtggaaacaggggaaatgtggcttttggtaagggggagggggcgggaaggtagatacttccgcggaagccgaaaatttggaattgcttcagcgaaaaactggcgcacaaagtgtcatcagacacggtcccttatttagaactgtgtatgatatgtgaacatcacaaacgattcagatagcttaacccgtgtgcgatgagtttgaacgtcaaaaattttgttccaatttccctggttacagtgctcatccacatcattgcataatttgggtacacaaaggagactacagcacacccgcacttcttaatcgagcaagttcagcaattaaacag

SEQ ID NO: 9217 - DNA, 381 bp, Triticum aestivum
  Clone ID: LIB104-061-Q1-E1-F4
gggatacaatgaaatgcgacgcaagctacacaaaaatgacaaataccgattttgaaacattgatcggtgtgtaaggctcactacaaataaaatcaatgattttaaaacctttgtgtaccttgcatgtcaatgtattttctcatgaaattttgcacacatgtagtatacatctatcgttagtgggtaattttttccagaatttttggagattgtgaaatgcgaagtttcaatttttcaaaacaaccaagctcaagcaccaaacgtgttttctgaggtaccagtccaaaactagaaattcataaaaaagagaatacaagtggaatagggccagttaaaaaactaaaaagttggacttgtctaaaagtacctctagaaagcctt

SEQ ID NO: 9218 - DNA, 389 bp, Triticum aestivum
  Clone ID: LIB104-061-Q1-E1-F6
cgacgggaagcttcgctgactgagctgacggacgcgctgcggacgctggggtcgacctccgcggacgaggtgcagcgcatgatggcggagatcgacaccgacggtgacggcctcatcgacttcagcgagttcatctccttctgcaacgccaaccccgggctcatgaaggacgtcgccaaggtcttctgaatcagttcatttcacctcagccgtccgatccaggagccgatccatctacgtacggcttcgtaaatcaatttcatgcaactacctactccggtcccgatccagcctcagcttcacctgaggccggccctaattttgtttgatcatttttttgctaccagtactaactagtgatgatcactgttccatcatttagttatttt

SEQ ID NO: 9219 - DNA, 380 bp, Triticum aestivum
  Clone ID: LIB104-061-Q1-E1-F7
tcgacgggcttcattgagcaatttgacacaaagaaaaaaatgtcacggagattgttgctcggacaacttctcgggcgaggaatgcaacacaaagagccaaatcggtggggtgtttggcgctcttcgtgtcactgatgacctgttggtgaggggggcgtattttaggaagcagcagcttgacaacaaaacaacatcacctaactctaactgaagaggacagccggtgtgatttgctcttacattgatatcgcatgcgtatgaataatggtccaatggaattgggagcggagtaagaagctcatgttgcctttatgcatgtaacaatcatgcctgcctgcacggcccgctacctgttggtccaatgcctggctgcctgcctg

SEQ ID NO: 9220 - DNA, 388 bp, Triticum aestivum
  Clone ID: LIB104-061-Q1-E1-F8
cgacgggttccactaataattatggaaattcctacaataattcttatggtaattttaataagatgccctctgattttgagaatagtgtgaaagaatttatgatttctcaaacgaattttaatgctttgcttgaagaaaaattgctcaaagttgatgatttggctaggaacgttgatagactttcgcttgatgttgattctcttaaacttagatcttctcctcctaagcatgcaatgagtctctcaaagtaatgagaatttcctttgacgagtgcaaggaaagaaccgctagattgcgtgctaaaaaagatagctttataaaagcgtgttctagtttccacgaaaataatgatgaagatcttaaagttattgatgcgtctcctattaga

SEQ ID NO: 9221 - DNA, 187 bp, Triticum aestivum
  Clone ID: LIB104-061-Q1-E1-F9
cgagcgatggtctgttccaatcaatctagccctctaggagtatgcgtttaacgccttggtttttgataaattctaaatttttgcacgaggtgcatgagtttttgactaatgttgactccatggataagacgcactctcacccttcgaccattgctagcctctctaagaccgtgcactttatgccggt

SEQ ID NO: 9222 - DNA, 436 bp, Triticum aestivum
  Clone ID: LIB104-061-Q1-E1-G1
tcccggctggacgggggcggacggcaacggcggcggcgcccacatcaacctcaaggtcaagggccaggatggcaatgaggtgttctttcgcatcaagagatctacccagctgaagaagctgatgaatgcctactgcgaccgccagtctgtggatatgaaagctattgcattcctgtttgacggtcgcaggctccgtgccgagcagacccctgatgagcttgagatggaagatggcgacgagatcgatgccatgctccatcagaccggaggccgcctccctccacgcgcctagaagaagccgttgagagtcctgcttgttgtcggtctacaagactctgatccatcattagagagcacatgaacgaatgaaagtctaaaaagaacttgtgaggctctggccccatgccatagctgaaggacattagggaaggttttg

SEQ ID NO: 9223 - DNA, 350 bp, Triticum aestivum
  Clone ID: LIB104-061-Q1-E1-G10
cagcaggaacccgtttcaaggattcatttcagattaagaccctgcgtaaaccttttttactatctcttgttgacaacatcccccggttttctctataaccgaggaggaggctggcgtcttggcatgtggccacgctagaatttttgcgcgtacctggacaccaggggcttttttaccaagggctctatttcggcccgtcctcatagagaccgaataccttacggagtgttcggcgtcgccagtttggctctatatgcatcagctccgaatcatgtctttggtcaaatgttgggtttgcccggctcctgtgtgttgctgccttacattccgtcatatcagctaatgcggca

SEQ ID NO: 9224 - DNA, 401 bp, Triticum aestivum
  unsure at all n locations
  Clone ID: LIB104-061-Q1-E1-G11
ggaacgaagagatcatggctaggggaacttttgccaacattcgtattgtgaacaagttcttgaagggagaggttggcccccaaaccatccatgtaccatcaggggagaagcttgctgtttttgatgctgctatgaaatacaagaacgaagggcatgacactatcatcctggctggtgctgagtatggcagtggaagctcaagggattgggctgcgaagggtccaatgcttcagggagtgaaggctgtgatagccaagagttttgagaggattcaccgtagcaatctcgctggaatgggcatcgtcnctctatgcttcaaggctggggaggatgccgacactcttggcttaacaggccatgagcgctacaccatccagcttccgactgatgtgaatgaaatc

SEQ ID NO: 9225 - DNA, 364 bp, Triticum aestivum
  unsure at all n locations
  Clone ID: LIB104-061-Q1-E1-G2
ggaataaatatagtgtctgataccaaaataattcacaaggaaggtggcccttaaaattccaaacaaaccaaaccttgaggaaaagcttaaggaaaaggggtgtacaggagagtcaggtttcgatcctgtggaactgtgggttacgggcccaccatgtgggttaaaagtangaagggcggagacgtcttgcgtgatcatgcaagcaaggtatgtcagaggatagcctatcagttatgtcggcaacaacatcagtaccaagggcgagggatgaagagaaccattttcctgctcgttgaacgaggcggaccagtaggcaaagttctcatccatcggtggttaccgaaatgtcatcaacaagaataac

SEQ ID NO: 9226 - DNA, 379 bp, Triticum aestivum
  Clone ID: LIB104-061-Q1-E1-G3
gctccaatagagcaagatcctgcatggaagtctccacatgcttagacagtggattacattgagcgaagactaatgatcaacatttaacttgataatgcatatgtccaggtgaacctccttggagtccccgtgcaccgcatcggcgggtaaaggatgccatgggttttccaagtccacattggcgggatagtcccagctccccggagtccaagtccgttcaatgaggccggtgtcgccgcccacgcgacccggaggggtagtaacaccgaccacgcacccgtacataggcctcgtgtcagtgtcagtgtcagtggcgtcgcccctgacgcacattacagagacggggtggcggcctgcgcgagcctcgccggtgcccacg

SEQ ID NO: 9227 - DNA, 366 bp, Triticum aestivum
  Clone ID: LIB104-061-Q1-E1-G6
cgacaaagtctagattgaagtaagatatagagcaacgggcacacgaaattaaatttttgtattgcatcatatgcgagactttctaagatctgactgctgttgcaccatatgaacatgaccaactagaaagaggaggttaggaatgaccttataagtggggtggtttcgtcttgcacgtgggataacacaatgggaccagggacctagaggaagaccagcctgccgcatggcggagagagatctacatcagcatcgcgactcgtgatcggggccctcgggggaataggatcatcgcgaagcagcggactcgcgatgggaagaaggaaaacagtgatttctccgtgcgtctaggtcgatgcctcctta

SEQ ID NO: 9228 - DNA, 433 bp, Triticum aestivum
  Clone ID: LIB104-061-Q1-E1-G8
cgacgggtagcatccacgtatggtgaaccattatgtgatgaagtcggagcatgatttatttattgatggccttccttatgagtggcggtcggggacgagcgatggtcttttgctaccattccatccccctaggagcatgcgcgtagtactttgtttcgataactaataaatttttgcaataagtatgtgagttctttatgaataatgctgagcccatggattatacgcaccctcacccttccacattttctagcctctctagtaccacgcaactttcgccggtaccataaacccaccatataccctcctcaaaacagccaccatacctacctattatggcatttccatagccattccaagatatatttccatgcaactttccaccgttccgttgttaataacacacttcaccattgtcatatttccatgcatg

SEQ ID NO: 9229 - DNA, 387 bp, Triticum aestivum
  unsure at all n locations
  Clone ID: LIB104-061-Q1-E1-H10
aagaagtacgtgaaacacaaagaaagagtgaagaaactatacagctgaaggagcagtgtcgaggggcggtaagattggagcttgaaattattggaaggagatacactgatatggcttcaatattgcgtgcattgggcattcctgttgaagggggcgaggttaaagctgcttataagcaagccctcctgaagttccatccggacagagtatcgagaaacgatatttatgagcaggtcaaagcaggggagacgttcaagttcatctcgcgctttaaggagaagctcaagatatagcttcnctgctaccagttatataggaaggtttaactttttgataggctgaaatcttgtcagcaggtcaagctgtgaaattgattgacgctgaacg

SEQ ID NO: 9230 - DNA, 399 bp, Triticum aestivum
  Clone ID: LIB104-061-Q1-E1-H11
aagtgatagagattgatatgatgagaatagacccgggggccataggcttcactagtggcttctctcaatagcataagtattctacggtgggtgaacaaattactgttgagcaattgatataattgatcatatttatgagaatatctaggcatgatcatgtatatatgcatcacgtccgtgacaagtagactgaaacgattctgcatctactactattactccactcatcgaccgctatccagcatacatctacagtatcaacttacacacagagtaacgccttaagcaagatcacatgatctacaaatgataattcatgcaatatgaaataagacccatcttgttatcctcgatggcaacgatacgatacgtgccttgctgcaccttctgtcactgggt

SEQ ID NO: 9231 - DNA, 338 bp, Triticum aestivum
  Clone ID: LIB104-061-Q1-E1-H12
gaagggaatcagaaaggaaggagcaggagcaggagcaggagacccagcagcaaggccaagggctcaccggcagacccccgctcgccaacggcaggtctggaatgttgccaatgtcgagccctccagcaaatccgggacagcttaccattttttatggtgggtcagtatgtgtgtatgactcagtgccaccagagaaggctcaagcaatcatgctcattgcagcagcagctgctgcggcctcaaaaagcaatggcaccgctgctgttaagcctccagcgatgtctgcgaacaatgcgatccaagccatgcttacgcggtcgctctcactccagaacact

SEQ ID NO: 9232 - DNA, 389 bp, Triticum aestivum
  Clone ID: LIB104-061-Q1-E1-H3
ggctcgacgggattaaatccatcactttatatgaaggagtcgccatcttctaattatctgcgtcataacccggctgatacttggtgagcttggtctcttcggcaatgattgtagcatgagggcgaatctccttgacacaagcagcaaagtcttgttgatcaaaaagagttccatcttccttgagactgggatacccactggctatgtccgccggatctaactctggtacctaggctttggcacggctcaaagctgtcacagttccggctctagcacaggatcgcttgatttcttggaacctagtgggcaagatggacaacttcttcaagacatcacttaataagtttggttcttgatttgcgggggagatagtggcaagagtccgctga

SEQ ID NO: 9233 - DNA, 373 bp, Triticum aestivum
  Clone ID: LIB104-061-Q1-E1-H4
cgacgggagaataagtgcatgtaaaacctataggataaccaagggtgatagttaatttgatccggctgaaaaccagaaactttgcccgcacaaaattatttcggttaaatcacagaaacgtgcttttgtgttgattattttttaggctgatcaatacacaaattgtccaggacttcctaatttggtaggatttttagtgttccagaagtttgcgttagttacagattgctacagactgttctgtttttgacagattccgtttttcgtgtgttgtttgcttattttaatgcatctatggctagtattaagtggtatgaaccatagagaacttgaaatacagtaggtttaacaccaaaataaataaatagtgagt

SEQ ID NO: 9234 - DNA, 360 bp, Triticum aestivum
  Clone ID: LIB104-061-Q1-E1-H6
cgacgggtctgatttggttgtgtttttgtgtttaattagtgcttgtgccaagtataaccgttgggaagacttggggaaaatctttttaatctcgccgtatcaaaacagaaactttagcgctcacgataactgcagccatttttatttcgaaagtgatacatagttaattattcttgcatataattagtaaatacattcctcacatccagcaatttattttagaattgttggggttccatatcttgcgttagcaacagattactacaaactgttctatttttgacagattcggtatttcgtgtgttgtctgcctaatttgatgaatctatgtctagtacaatactttagaaaccatacata

SEQ ID NO: 9235 - DNA, 367 bp, Triticum aestivum
  Clone ID: LIB104-061-Q1-E1-H8
cgacgggagacaaattggagtacgaacggttctgcaaaatgggcctacggccttctctcaaggacatctgctggaacggtccgtcagaggaaaagcttccatcagtatcggagtcagtacctccaactccgtcctccaagtcgaccaaaagaaatgtcatttaagtgtgatatcttccgagctgcaattacaatctattctcctctctctttcttccctcctcaaagagctgagactttgctcacttgagtatcaagctttagggctctttgttaatcctttttgcagtttcccttttgtggtagcaattgtagtatatggatttcctgttttgttcaccaatagaagcacaaaaggtgacagtagc

SEQ ID NO: 9236 - DNA, 355 bp, Triticum aestivum
  Clone ID: LIB104-061-Q1-E1-H9
tgcatgaatgttacatgtgaagagcgagggcctgcaacaaagaaaaccgaagaatgggcttcgtacgcgtatggtatgatgggctgggcttgtcgagctggaccggccagagataacaataccggtccgttctcatccccaagaaaagagaaaatgggtccgttgaagagggcttgctcccactcacccccgcaaaaaaaaaaaaaaaaaaaaaaaaaaaaaaaaacacaaaaaataaaaaaataaaaaaaaaaaaacaaaaaaaaaaaaaaaaaaaacttgaaaaataacaaaacaaaaaaaaaaaaaaaagcggccgcccaaaaggttcaaacctaacttacccttgaatgca

SEQ ID NO: 9237 - DNA, 359 bp, Triticum aestivum
  Clone ID: LIB104-062-Q1-E1-A1
gggatccactaaagtggctctcaataggctaggcgccgacggcttcgttgtcagcaagaacgccgacgagatgaaggctgcgatgagcaccatggatggcatcataaacacggtgtctgcaaacatccccatggcccctctcttcgggctactcaagcccaacggcaagatggtcatggtcggcctcccagagaagcctatcgaggtccctccctttgctctggttgccaagaacaagaccctggccgggagcttcatcagccgcatgagggacacccaggagatgctggacctcgcggcgatacatggtgtgacggcagacatcgaggtgatcggcgccgagtacgtgaacacggcca

SEQ ID NO: 9238 - DNA, 272 bp, Triticum aestivum
  Clone ID: LIB104-062-Q1-E1-A2
gcgggtaattcagtatgatgattgtgatatcaagattaagaaggtgaatgttaaaaccaatcctgaaaattgtaataacaagtttgaattttgcatgtaatccaatccaatgtggtgttcctccgaagaaagctttaagttaaccccccaaaaaagttagaatccaagaatgcgttttaagccgccagcacggcgagattgccatggtgctgcgtgaaaagccgcaagacgtatcaaaagctggaaccctgatggactgcatcaaattgggt

SEQ ID NO: 9239 - DNA, 397 bp, Triticum aestivum
  unsure at all n locations
  Clone ID: LIB104-062-Q1-E1-A3
aacgaaaaagcttctcctcgtgtggccgagcagtgagcgggggagtggtgagaggcgaggattttgctagctagttggtgtgtgctcggggcaaatcaacccagctgctcatgtgtacataaagggcaaacccagtagaagaagagccggtgagggcgggttgagctgagaacggagggggcttaaagggtaaactcatcaataaaattaaaatcaagggtaaactaantcggcccgccccgtttgaactaatgcaatccccggttgccctctggctcccttgctcaatgccgtgtactgcaatccctgttaatttcatctttgtttatcctgtttgttatccgaatcaactgataccgtgcatgaattgaaacaataatatatactccattagacc

SEQ ID NO: 9240 - DNA, 300 bp, Triticum aestivum
  Clone ID: LIB104-062-Q1-E1-A4
gtcgtctatcatttatcttcaaatgagattgaagctatatagatatccgtgagatataactagaacttccatgaatgtgtgtatttctatacacgcacaatcaactttatcccataattaaggcttggccacacctgtgcaacgtatccatatgtattgtgatgatactacttaattatctcagtgcaactcaggtacttcgcatataaaaaaaaaaaaaaaaaaaaaaaaaaaaaaaaaaacaaaaaaaaaaaaaaaaacaaaccaaaaaaatcaaaaaaaaaccaaacaatacaaaaa

SEQ ID NO: 9241 - DNA, 414 bp, Triticum aestivum
  Clone ID: LIB104-062-Q1-E1-A9
cggtcgacgggtgaggaacgctgatgtgtgtatatgtgttctgctaaattaaatagggcccaaaatgtagtggcaccaaagctttggtgaactgattaattgaattgtatggctgtagtgaattaaacgtatgagttagtacataataatgtttgtgtgaaatggaggggatgctgttggtcgaggtgatctaaaaaaaaaaaaaaaaaaaaaaaaaaaaaaaaaaaaaaaaaaaaaaaaaaaaaaaaaaaaaaaaaaaaaaaaaaaaaaaaaaaaaaaaaaaaaaaaaaaaattaaaaaaaaaaaaaaaaaaaaaaaaaaaaaggggcccccccaaaggttccaactttaatttccccttaaagcaaatttaaaccccctccaaagggcccccaaaattcaattccagggccc

SEQ ID NO: 9242 - DNA, 278 bp, Triticum aestivum
  Clone ID: LIB104-062-Q1-E1-B12
acggggtatgcaagacaatgtccatatacgttattctacacgatcactctacagatccatctcctcttggttaactgcgctatcaaccatgtctgtataatgtactgtgttgctgacgttggaagttgattcacaacactgtgaccagtaggcagggctgcccacctcccccatcgtgtctcgaccctctgtgtgcgtctgaccacatcagtacatcgcctccgctcatccctcgacgtcccaccctactccctctctctccagtcccttgtctgctg

SEQ ID NO: 9243 - DNA, 367 bp, Triticum aestivum
  Clone ID: LIB104-062-Q1-E1-B5
cgggtcgacttctactccaacggctgcggtggctgccgcgctctccaacccaagattgcgcagttcgctaaccggaatcgggacttgctgtccctgcaagtcaactacgagaagcacaagtccatgtgctacagcctccatgtccatgtcctccctttcttcaggttctacaggggagctcagggcagggtcagcagcttcagctgcaccaatgcaaccatcaagaagttcaaggacgccctcgcaaagcactcgccggaaaggtgcagcctcggcccggcacgggggctcgaggaggcggagctcttggctctggctgcaaacagggacctggaattcacctacaacgagaagccgacgctggtgc

SEQ ID NO: 9244 - DNA, 321 bp, Triticum aestivum
  Clone ID: LIB104-062-Q1-E1-C1
cctgaccttgattgccgctaccgttaacgctgcacacattgttgatttcacgtgtttttctactatttttttatgttcgtctcatcttgtttaccggtgagatgtgtacattacccggtcttgggaaggggaggtgaattgaaatttgtttcttaaaatgtatgtcttcaaaatattcctgatatatacaaaaatgtacacatgtgtctgaaaaaaagttcacatgtcaaatatttctttgatgaaaatgttagtcatgtgtttaagccatgttcaacgtgtttaacccatgtttcctacttagggaaaattttaagtggg

SEQ ID NO: 9245 - DNA, 443 bp, Triticum aestivum
  Clone ID: LIB104-062-Q1-E1-C11
cccgggccgacggggatgtcaatggatggtatctggctgattatttatatcctcacctatataaatatatgcagtgcaatattcttcagcggtagatagggtccctgctgtcatgtgcattctacttgacactgggtttttttcatttctgcacgggcagacctaaccctgtttcactgaatgttgcaagtaatacagaccaaagtttacaaccaatggcagaagaatgcgttttgacacttgagaaggcacataaatcttaaacacaaatacatctcctggaggcatatgtggcttgcttcggaacaaacaatgtaggtgcttcacagggttgggtcgctgcaaaaattacttaggtgtgcatgacagacttaatatatatcttaaaccaaaaaaagggaaaactgttccaaagctaaatggcgttgttgttcacaaaatga

SEQ ID NO: 9246 - DNA, 364 bp, Triticum aestivum
  Clone ID: LIB104-062-Q1-E1-C3
ggattgtgaccttccggacagcccaggacagcaacggggtgcttaactcgtgggcgtcgaacctggagaagctgctggacctggtggagaagagctgccaccaaatacacaaggagacgatgatccacaaggcggtgctgaaagcctgaagtgaaccattttgaattgaatgtggccttgtttaggttgtgtgcgtagtagactttctctatggatctgaattcactttcactgtatgggtaaaactattctctctgctcaggtgggcatcgcctgtttgctttgggaactcgtgtgcgaaccggtcccgaaatactgtaaccacagggaatgaccaatgctatttgccgtagttttccaaaaa

SEQ ID NO: 9247 - DNA, 226 bp, Triticum aestivum
  Clone ID: LIB104-062-Q1-E1-C5
cggggagactaggcatgtcaaatccccgacgtgtcatgagtatacactggccttcgtatgatattgaatactttttacaagggtgcccccccatatgtcgaagcctaattaatcctggatacgaaatcatagctcttccccaatatgatctaaacttacgtaaccgtccattctatgtcatagtccttccagggaataccctaactcattcaccgaccgtcctttt

SEQ ID NO: 9248 - DNA, 411 bp, Triticum aestivum
  Clone ID: LIB104-062-Q1-E1-C7
gacgggacagccaaactgcgacgtcatctacagtgtactggtccccttggcactattttataaagtgcccaggggacagcctgacatgcaccacacctcttatgggcatggtgccccatgctcacttgccccccacgccactcacctagcttaggaaattagctaaccattgcatataagggcacacatccatccatccagggaatggatccccatggactctcacgcacacaccctatcatgcgagctctcaagagagctatctacccatccatccattcacacacaacacacacgcgcatgagcactcacatgctcacggccatgagcatggccggccactagcatgccacatacgaggccaggtgccagatgcctacggcatttgactcagatacagctcgaggagca

SEQ ID NO: 9249 - DNA, 313 bp, Triticum aestivum
  Clone ID: LIB104-062-Q1-E1-C8
gacggggagcaggcgccagaagccgttgaggaccaggagcactcataagaaactacactacacgtaaacagttacaagaacctacatacatgttcgttccccacgctgatgttgctcttgtgtattgctgctgctgcccatctttattctcatctcacagaggcacgcagtggctgttatgcatcttatcgtcttggctatcgcaatcccgaattctgtatatcattgcccgtgccatcgtctcgtgaatggtagcagaatttgcacaaaaaaaaacaacaaaaaacaccaacgaacacacgaccaaccacac

SEQ ID NO: 9250 - DNA, 139 bp, Triticum aestivum
  Clone ID: LIB104-062-Q1-E1-D1
gtcctgcaattgaggagattactggtgatgccgttatggcgtctcaaacttcacgcacagtaaatagggctactaacatctctgctctagtgcttatcaaactgatgtacaaagatgttcctatacgttgtggagttga

SEQ ID NO: 9251 - DNA, 441 bp, Triticum aestivum
  Clone ID: LIB104-062-Q1-E1-D11
cccgggccgacgggtcatcttatcttgatacattactctgtttatcatgagcttaatactttgagatgcatgctagatatcggtctttaggggcggagccaggatttgacgataggggggcgaagtattcaataaacatatagaagtttttttttcctaacaatgaccattctatgaggaatacaagataatatggattttgctattagaaaatggtagattttcattagtttgaatgtggttcttatgcctaaaactcacaggacaaaatgtataatcttatatggaattctaacaataacaatctctcagtttgtgaaattctaacaataataataacttgcgatgatgtagacatgagccgatgatataccttagatctgaagtgagtcctgttgagtagtgctaagggcaaattctgaaactaagatgatagaatca

SEQ ID NO: 9252 - DNA, 358 bp, Triticum aestivum
  Clone ID: LIB104-062-Q1-E1-D3
gtcatatatcagggcccaatgtctggtagtagctgaatcatggatcacatgcacagaactcggttcctgaggacagctacaatgagacaacccaccatgtactcctacatggcctctcatcgctacctttaccaaatcgtgttcacacacttagctcacacatagtaggacatgtttacacacctctgattcatcctcgatgaatcagacctgactcaactcgaagcagtagcaggcatgacaaacaagcatgaatgagtaggcacatcatggctcaaataactcctactcatgctagtgagtttcatctatttactgtgacaatgacaggtcatgcaaaggataaaggggttcagct

SEQ ID NO: 9253 - DNA, 312 bp, Triticum aestivum
  unsure at all n locations
  Clone ID: LIB104-062-Q1-E1-D4
gggagatagacaagatgactggctgcaacggcaacggcaacggcaactcgtccgcatcncacaatgggacagcagacggtcactgagaagaagttcggaggaattgcaccaaagaagcctctgatttcaaaggaccatgagcgcgcctacttcgactccgcggactgggtcctcggcaagcaagctgcaagcaacaacgcacaggcggccgcaatcgagtccttgaagccaaagctaaagaggacgccccatcaccagctcccacctcgcaagccggcctgcgcgtcgggctgatcgaccgcgacgcgacaa

SEQ ID NO: 9254 - DNA, 251 bp, Triticum aestivum
  Clone ID: LIB104-062-Q1-E1-D5
gacgggaggcgaaagtggaacttttggcgatcgtggtggctttgtccctgctcggtcgccgcatttgacgtgcagtacatcatcgacgagtgatgtcaccgttgatctgtacgaataatttgtgtcaaataaacggggggaagtgactagtgaagtcaaacgacctgtaacttgttaccctattcttttgcaaatgttcatgctaatcatgccataaacacgaactgttcgcttcaacaaatatgacaaaa

SEQ ID NO: 9255 - DNA, 270 bp, Triticum aestivum
  Clone ID: LIB104-062-Q1-E1-E1
tgggcgcatcccacactgagttgtacaccggcggcgagaggagtggaatggttgttagagatcgatccaaacgcacaaatgttgcggatgacgtttttaagcaagctaagaggaagggagctaagcaaggcccagctcgccggcaatcttctagttcaaggagccttcctgggactagcagacttctaacaggtgaaactgtacagcctgacacaccacagccaccagaggaaattgttcacaacatccacttccggagtgatgggttca

SEQ ID NO: 9256 - DNA, 388 bp, Triticum aestivum
  Clone ID: LIB104-062-Q1-E1-E10
aattcccgggccgacgggacgctcaagaacgtgaccccggcgctgcacccggagatgatcctggcggcgaccaacaacggcgacatcgtggacgcctaaagcaaagcaatgaaccacggacaccaagaggcgtacgtacgctggtgtttgggggcgcaaaatcaataagatggttcggtgaaacggaggatgcttagggacgagggcttgtctttgtgatttgtcagactcgtgtttaattccgatgtttatctttagttttcttgtgttagcgtattttgttcatgccacctgcccgccatgtgctctgctctgctctgcctcacggcagctccatggatgatgaatccttctggaacaagaggagggaataaaaaggttgagtttt

SEQ ID NO: 9257 - DNA, 369 bp, Triticum aestivum
  Clone ID: LIB104-062-Q1-E1-E3
cggctacctcatgaacactgcgttggatttgcccgaacaggagaggatgatgcagtaaagtagcgtaagtattttccttagtttttgagaaccaaggtatcaatccagtaggagaccacgcacaagtccctcgtacccacacaaaacgatagtaactcgcaaccaacgcttaggggttgtcaatcccttcacggtcactcacgagagtgagatctatagagataatatttttggtatttttgatagatagatgcaaagtaaaaataaaggtaaagtaaaaacaaagcaagtaaataaagtgatatagattgatatgatgagaatagacccgggggccataggtttcactagtggcttctctcgagagca

SEQ ID NO: 9258 - DNA, 454 bp, Triticum aestivum
  Clone ID: LIB104-062-Q1-E1-E4
cgggtcgaccgggatcagaaggatatggacaacgcagatgcagctggagaacttgtaggtccgattcctcctctgccggatgctcaagtggataatgatggagcttcagttgaacagagtacttctaacgctaagagtggtgagaacgttgccatgaatgagggagctgttgacaaggttgattcgtccaaattagatggtcaagacaataccaatggtagcatggatgttgatgctggtagccaggaagagggaaacaatgttcctgccgctcctgatgctacaattgtagatgtagggaacacacctgtatcttcagattaagctgtctcgaatgaagagagtgacgtggtccctgaatgaaacatctaccacatacctcatctgcggcgcatgtcacaagcatgatgaggaaggtaactagaaacaggatgcagttgcaaagtgtgaaact

SEQ ID NO: 9259 - DNA, 307 bp, Triticum aestivum
  Clone ID: LIB104-062-Q1-E1-E5
acggggtaagttacgtgattcataagggagatgtgagagtcaagatgatgacaaccccatgacttcaagctcaagatggacttcaaaattcactactggatggaggacggttgacgggcaccctacagaaaccagcggatggtcgggatgcatggagaagcgccatgacatcttgcggaaagcttcacccagccacgatgagatggatggataccccattgaccggaagcttacatgtgcagccgcaagccattatgggccctgtcttgttcgaccctaagcgttactttggctggaaggtgctacc

SEQ ID NO: 9260 - DNA, 413 bp, Triticum aestivum
  Clone ID: LIB104-062-Q1-E1-E7
caggtactagtcaggaatgcccggtcgacgggaaggttgatcagctggattcgtatgaaattgaaggaggtgaaacaaaatcagaaatcctgcagaatcttaccgagttccagttttcttgtgttatgtataatgctgttctagagaatgcgtgcagtgagcttggtgcccgtatgtctgctatggacagctccagcagaaatgccggtgaaatgcttgaccgtcttacactgacatacaacaggacacgtcaagcatctatcactactgagctcactgagatcatatcgggtgcctctgctcttgagggatgatgatgaaactttacgctatcatcttttttatttttctgttccaatgaaggccacttctaatctaaaaacagccttttgcattctcctgtgattggatct

SEQ ID NO: 9261 - DNA, 429 bp, Triticum aestivum
  Clone ID: LIB104-062-Q1-E1-E8
acgggcatccccagcttgcaacaaaaaatcgagcgcccagggagatgcccagtgctgcaacctacgacgaaaaaagcttcaaccagctacgggaaaagtttcaaatcgtatgacagaaacctatgaacgaccaaagaaaagttacaaccggtgacaaaaaaaaacttcatctgacgacgaaaaaagcttcatccgacaatgaaaaaagcttcaactgtgaagccgtaagccatggacgacaaacgaaaaagctacaaccggccgttgcaaaagctacaaccgcattgaaaatgtcacacagtcatagcaaaatgttgttacaattgaagcatttctgttagcggttgcaacttttctaatttgcatggtgtctagttgtagctttctctctcaatggttggagctttttccaactacagttgaagcttt

SEQ ID NO: 9262 - DNA, 388 bp, Triticum aestivum
  Clone ID: LIB104-062-Q1-E1-F1
acggtggataaaggcatccgcgtctcgttgtcaatcaatgatgcatgctgttttaccccggcgttggacacgacagcagctccttgtgccgaccctttgcttgccagtgataactccaactacgttaaccatttggcttgaaaaaatttgatttgtttttgacgggtaatttttgtttccattataggtggacaccatgatatactccctctgtttttgaatataagcccttttagagatttcatcgatacggactacatacggatgagcaagttgggcggctagtgacttatattcagtcggtgatgagatgagatgcgtcgactttgacgtggagtatggaagcaaactgtggaaagttggaccggcaaccatggccaaggaagca

SEQ ID NO: 9263 - DNA, 350 bp, Triticum aestivum
  Clone ID: LIB104-062-Q1-E1-F12
aagtcccgggcagacgggcagcggacggatgtatttgctctccagtgcacgtgttgtctcgattgacgacttgttttcttctatgtatcgaatatgtggaatattatttgtaatatacttgaaaaaaaaaaaaaaaaaaaaaaaaaaaaaaaaaaaaaaaaaaaaaaaaaaaaacaaaaaaaaaaaaaaaaaaaaaaaaaaaaaaaaaaaaaaaaaaaaaaaaaaaaaaaggggccccccaaaggattcaaacttaatttacctttaaaggaaagttaaaacccctcaaaaatggcaccaaaattcaattaaagggcccttcttttaaaaggttctaaccggaaaaaccc

SEQ ID NO: 9264 - DNA, 339 bp, Triticum aestivum
  unsure at all n locations
  Clone ID: LIB104-062-Q1-E1-F5
acgggaagaagncccgaggaggagctaggaactgaatatctggtgcagccgcttggccgtgctgaagacgaagagcattccagtgacttcgagccagaagaaaatggtgatggtgctgaggacgaggagattgaggatgacgatgctgaggatggtgaggatcctgtcaaggcgcaatcctcatcaaagaggaaggggtctggtggggaagatgaagatgatgacgacggtgatgatgatggtgatgatgatgagaagcctccatcaaagcgatagtcaatttgttcgtgctgatctgtgatcttctctgcttgggccaagaaggaaaataatcctcat

SEQ ID NO: 9265 - DNA, 357 bp, Triticum aestivum
  unsure at all n locations
  Clone ID: LIB104-062-Q1-E1-G10
catggnagatatagtgagagccgaacagggagaccaccgctgactctgatgctcgccattctccccgacaaggcgatctggttggaggatgtcgaggatgcgaagctagtgaggcagttgtccgcggagccgcccggaaggccagcaaataacaccgaggaacatgaggcgtccccgaattacttgtcgcacgtatggatgtatctagatgtattttagttttagatacatccatttcaacgacgagtaatttggaatgaagggagtatgagatcaaggtctcatttatactacatatctgctcaatgcttgcagtagaaagcttttctcattgttgtgtggcaagagctgatattt

SEQ ID NO: 9266 - DNA, 405 bp, Triticum aestivum
  Clone ID: LIB104-062-Q1-E1-G12
tcccgggccgacggggatgatagaagctcttgagaaagttgagaaggatattaagaagcctcttctgaggagtgacaagaagaacatgggtctcctcttggcagagtttgacaagataaacaaaaagcttggcattcggaaggaggatcttcccaagattgaggaaaatcttgaaatggaacttgccaaagctgagctgacggaacttaagaaggaagttgttgaagcaatggagggtcaactaaagagggaggagtttaaagatgaggcgatgcctgacgtcaggaagttggacattagaaacttcctctaagtccctgattgatgataacccttggggtgaccgatctgtgatttttcttttcaagtgacggcaggtgctgttagccacaccgaatggatgtt

SEQ ID NO: 9267 - DNA, 370 bp, Triticum aestivum
  Clone ID: LIB104-062-Q1-E1-G2
cgtgaagatgaacagatcgagtcctgtacctgtgtgccccccggcttaaccccttggttccttccttgaattaaaggacctgcgttcccaaaaccctttcgatctgttggagtcaggtgcgatgtgcccgcggctggaaggagttagttgcaagccagctagatggttggccgggtcatgctagtgcatgcatgggctagcccggcgggtcatgtggtcatgcatggatatggatcgtgcatgtagtggttagcctagtgcgtgagttagttgccgggtgtgcaggccgtgtggtgtgtgtgcacgggtataaaaacccctcctccatgtactgatccagttgagccggtgtgtagccatgttaccactg

SEQ ID NO: 9268 - DNA, 445 bp, Triticum aestivum
  unsure at all n locations
  Clone ID: LIB104-062-Q1-E1-G6
aatgcccgggtcgacgggaaggtaaagaggattaacgctgtcgccgtcggcgagggagggaatccactaccggtgcagctgttcactttcacccagcggcggcgcgggaaggcctccgagcccttcttcttcgccgccgtcccgtcgcccaccgaaccacgcaccaagaaccttaaggtataatttacttattccacatgcattgctctagttgcatgtataccatgaatctaggacgtggttcaaagaggaaaggagtgggggaaagtagtgggaaaagttgtatagcatgaatctaggacgtggttcaaagaggaaaggaagggggaaagttgtatagcatgaatctaggacgtggttcaaagaggaaaggaatgggggaaagtagtggggaaagttgtatcacataaatctaggacgtggttcanagaggaaaggaaagggc

SEQ ID NO: 9269 - DNA, 78 bp, Triticum aestivum
  Clone ID: LIB104-062-Q1-E1-G8
acgggaaagttaacacgttgcgtacccttgttcttgttttcgaacggtttctacctcggatttcactgtcttgatgtt

SEQ ID NO: 9270 - DNA, 370 bp, Triticum aestivum
  unsure at all n locations
  Clone ID: LIB104-062-Q1-E1-H10
cccgggccgacgggcacataagtctaaagatgaccgctaaaccagcatatataaaaaatatgcagatggcagcaagcccacaccaaaaagtcattttctccaaatctatggctacctttaaaagcatattgaaagtggagggtgtaacaaatagtgatgatcacaacttttcacattagctagtcattctgttttctctgactattgatgcagtgtaggtagattgttatgaaggagctacagaaaactccatcaagaaaatgtcaataaacttatgatgattgtaacctagattaagcttaactagaaactacgtaatttgtaacagtggtaagggtttgctgcatgattcatgctcattaacanagct

SEQ ID NO: 9271 - DNA, 214 bp, Triticum aestivum
  Clone ID: LIB104-062-Q1-E1-H12
gacgggaatcagacatgttgacatcgaggcgcacaacccagacggtctttcagtttagagtagcattttttgtacatttttatggatatattcggttgattgatcacgcttgctgatcaacgccaatctgatttgttctatgacctcttgatacttttaacccccaattaattaaggcaatggcccccatgttaaaaaaaaaaatttaataaaa

SEQ ID NO: 9272 - DNA, 226 bp, Triticum aestivum
  Clone ID: LIB104-062-Q1-E1-H3
tcgacggggagggaaatttggattgaactgtttcggtaaaaattctgtgttcaaaagggcactgaagaatgttccctggaaaataatgtacatattgctgtcttttctttctcttgtaaataaaatgaacagtatagaaatttcaggatgaaccaactaggaagacatttgcgttgtatattaattaaaacctattataattgttgaatattcaattttgtaaaaa

SEQ ID NO: 9273 - DNA, 345 bp, Triticum aestivum
  Clone ID: LIB104-062-Q1-E1-H6
acgggcaatggaggatgtaggtgtgatatgtcaagtagtggacagataagccaaccactggatgtggttttcagggatttttgcagtgggatttgtagggtactatgctgcgctgtgtttgggatttgaaataaaacgatgggagatgtgccacgctcttaaatgccagtcttctgctctaatcttgctaaattacttgttgcattttgcaaaacagaaaaaaaaaaaaaaaaagcaaaaaaaaataaaacatccaaacaattgcacaaccagaaatggaaaatgggacacaccatttaaacggcccattaaacacagaaaaaaaaaatggggcccctcaaaggg

SEQ ID NO: 9274 - DNA, 330 bp, Triticum aestivum
  Clone ID: LIB104-062-Q1-E1-H8
cgggccgacggggaaaatcaccacgacggactgcatctgcccagacgattgttgcaacggccacgacaaagtgcatctctcaattccgggatcagcatgctggatgaatcctccttgcctgttaagttgcaacggtgcaaccaaacaccatggaggcttagggacggtgaatctgcatcgacagtgatggatggaaattgctcgccctccttcctccataaaccacggggaccttgtacagttgtattagcctccccatctatccgtcaggaagccctgactttccctgctattgctgtcgaaaatgctacccttgcagaacatgacctg

SEQ ID NO: 9275 - DNA, 293 bp, Triticum aestivum
  Clone ID: LIB104-063-Q1-E1-A3
cgggccgacctccgcggacgaggtgcagcgcatgatggcggagatcgacaccgacggtgacggcttcatcgacttcagcgagttcatctccttctgcaacgccaaccccgggctcatgaaggacgtcgccaaggtcttctgaatcagttcatttcacctcagccgtccgatccaggagccgatccatctacgtacggcttcgtatatcaatttcatgcaactacctactccggtcccgatccagcctcagcttcacctgaggccggccctaattttgtttgatcatttttttt

SEQ ID NO: 9276 - DNA, 319 bp, Triticum aestivum
  Clone ID: LIB104-063-Q1-E1-A7
acgggagagttatggaagctgctcagcctcaagcacggcagcggcaacgactgcctcctcgaggatttcgcgacgcacggaggagacacgaacgatgtttttttcgacgaaccggatcatgagcatcagaaacccatggctcttcttatggatttatatccaggagtgcttacaggaatacatagcatcgactaccagatcctattcaaccagaaaactagctacctttcagaccatggtggtggtgccggcgacacttgggctagtggataacatcacggccaacaagtcgtggacaacatcctggacatggtaaatc

SEQ ID NO: 9277 - DNA, 440 bp, Triticum aestivum
  Clone ID: LIB104-063-Q1-E1-A9
gggccgacggggtttaccacaatcatcattgctgtacacaccttttgagagagccatacatgatttggaatttgttagaatactctatgtgctttgcttatatcagttgacttatacagttttgctctggtacttcacttatattttttagggcacggtggtggagttgttttatagaaactattgatctctcaagcatcacttagattattctgagagtcttaaatagcatggtaattttcttaaataatcctaatatgcttggtgttcaagaatagtaaaaactttcttatgagtgttatgaatgctatgagaagtttgatgcttgataattgttttgagatataaagatggtgatattaaagttgtgctagttgagtagttgtgaatttgagaaatacttgtgttaaagtttgtgattcccgtagcatgcacgtatg

SEQ ID NO: 9278 - DNA, 213 bp, Triticum aestivum
  Clone ID: LIB104-063-Q1-E1-B1
gggtcgagggcgaagatatgattaagaaggttcaggagctgaaggcgaaagcgaaggctgctttggagaatcggcgggtcttcgtgcatgaatctggacaagctggtccaatccgtcgtcagaaaattagcgcaccatgtcggccctgaataaattctgcggctttcactcattgatgaacagattggggttgtttcctgcgtgcgtggaaga

SEQ ID NO: 9279 - DNA, 427 bp, Triticum aestivum
  Clone ID: LIB104-063-Q1-E1-B4
gggtcgacgggtcggtgtacgtcaggatacatacttgatccttttctgcttcggggtggtgagaaaaatcgtcttgcgagcacagtcgatgtttccttcaaacttggtcaaccaatccatgcctagaattacatccaaactctgggattccaatactatgaggtctgcggaaaaatcatggtttccgatgctgagggtcgaatgacagcctaagcctgccgtcatccctccccctgggggaaataactgaaaccgggttctaagggttctagtgggcaacccgtacttttccacaactacccttgatatgaatgaatgcgttgcaccggaatcaaagagtaccaatactggatgtgaatttaataaaaacttaccaaccacagtgtctggctgatcatagacgtcttccacgtcaaggtgattcacc

SEQ ID NO: 9280 - DNA, 197 bp, Triticum aestivum
  Clone ID: LIB104-063-Q1-E1-B5
gggccgacgggtagctcaagacgctcacccagttcgtcggcagtcaagtcgaggcaaggatgaagatctacgccgtctcaacgaggcattatttcgccttcggtgccctagtctctgaggaacactcctacgtcatcaatgcgttgcctaaactccgttgggttcgtccagaatcccatgtgaatgtcaaattgcca

SEQ ID NO: 9281 - DNA, 298 bp, Triticum aestivum
  Clone ID: LIB104-063-Q1-E1-C5
cccgggccgacggggaacccaacatgactctactcgagctaactgtcactcctgccttgttcacatctatctccttgcctttcccctcctagtcatcccgtgagatggacagacccagcgcactccgacaatggctgcccacgcgactgccaaccacatttcgatcgtactctccatctaccatccgcccctctgcttccatttgcacttctcctgggggatcgatttccaggtctgcttccagcgcaccatcgtctggtaactcttcggcattatctacacgctctgggtcatcacc

SEQ ID NO: 9282 - DNA, 109 bp, Triticum aestivum
  Clone ID: LIB104-063-Q1-E1-E11
tcccgggtcgacggggacgacgacagtgtctcggtggtgtacggtgattgtgtccgcgaaaagctagaagcctccaacaatagcttcacaacggtcaacatgatcttcg

SEQ ID NO: 9283 - DNA, 452 bp, Triticum aestivum
  Clone ID: LIB104-063-Q1-E1-E12
gtcaggaggtcccgggtcgacgggcccttagccgacgtctcggtgcccgaaggtggttgtgttggtggaaacaaggcaatcagatatacgagctttataactttcacttagtcataggagcttaaagttgggaggcgagcaagtagccccctgcttagtgtttggcgacagccaaggtcaagccgtaaacacttcggccaatgttatgaacggcccgtcatttaatatagccatcggatcactgaccggtttatgctttattatggcagtcagttttcggctttctccaccgaggtgcttaaccatgcgagctggaagcacaatcgcagtggttatccttttgcacacctaaccgaacaaagcggaatgtaggaggcaagcacaggagccgggcaacccaactatcgaccgaagacacaatttgaaaccgatgcatatttagcaatatccaa

SEQ ID NO: 9284 - DNA, 427 bp, Triticum aestivum
  Clone ID: LIB104-063-Q1-E1-E2
gggtcgacggcagtcgctggtctgactgaactgctgggactatattaagtcgccggtctgcctgagccgcctctgtcgcgattgtccgtcgtccgaaagaatcaagtcatatctctctaaatatattttaataacacatgttgtttttaaccaagaacaaattactttggccaaaatatttttgtaaacaggataattattcactacaaatagggtttatgccacgggtgtggaacacgggctgatagtgttccgcccagcgatagtctgtgacatattacccgatgaatggacgcgcacaagccgccgccctagtggcccggtctacatcgacttgcggggatcgcgtttgttcgcttttcaatggacgtgcgcaagtcgccgcccatgtggcttgatctacatcaactagtccggaccaagcctg

SEQ ID NO: 9285 - DNA, 98 bp, Triticum aestivum
  Clone ID: LIB104-063-Q1-E1-E4
gggccgacgggcacattaatcacaagtcactctaaaagatttatccgtattgtcgcttcccagccactgtaggtcacttcaagagagtatgccaaatt

SEQ ID NO: 9286 - DNA, 193 bp, Triticum aestivum
  Clone ID: LIB104-063-Q1-E1-E6
cgggccgacgggcatacaaggtttaccggagatcggggtgatgtagagtgcgaagtccgcagtttgccactttgtaaagattcctccctacatagcgttgtcatgccatgtgtggcttgctctcaccagggaagttgagttgttgtatgttgtgtagcagaatgatgctttctgcctgtggaagtaaagacac

SEQ ID NO: 9287 - DNA, 110 bp, Triticum aestivum
  Clone ID: LIB104-063-Q1-E1-E7
agtcccggcccgacggggatcacaagaatgcctcggatcacaccaataaggaccgcgatcatactaaggaccgcgagcacaaggatggcatgattaagcacatcatgacc

SEQ ID NO: 9288 - DNA, 364 bp, Triticum aestivum
  Clone ID: LIB104-063-Q1-E1-F10
ccgggtcgacggggattgtgaaagttcggacactgtagactactgaggtgttcaaacacagcgaaggctaaatcgactactaacggcacagcaacatcacgatgacagctatagctattgacacagctcaggacgctctcgtgcatcatcgcacaatgtaggcgaaatcgatgaacgcttgggagaagtgtggcaaacagatacagtcgcaaggtatggtgcatgtgatatcatatctctgcaatgctttacatgtctcacagatcatgggacgtcgaataataacctcgctgcagtgaacagcacggtgcttgtaacattaacgtcaatcaatcatgttggcattcacgcatcgccgttggta

SEQ ID NO: 9289 - DNA, 354 bp, Triticum aestivum
  Clone ID: LIB104-063-Q1-E1-F4
gggtcgacggggcggggacggcgtcggtggtgaggtccatgaacgacaagttcgacctggtcatcgtcggacggagaggggaggacagggacgtcgaggggtcggcgctcacaagcggcctctcggagtggaacgagtgcccggagctcggcgtgctcggtgacatgctcgccaccgcggagttcgcgtccaaagtgtccatcctcgtcatccagcagcaggccgggattaccactggcggcgatgccgactatcaataatagggactggttcgactttggttcatcgttacattgtttctttctcgttgaatatatgtatgtatgttgtaatgaaagcaaggtaaatttgttc

SEQ ID NO: 9290 - DNA, 237 bp, Triticum aestivum
  Clone ID: LIB104-063-Q1-E1-F9
ccgggccgacggggaacgtgaaagtgtgcgccggtacgctatgagctgttcatacagagtgaaggttcatttgtatcttgacagatgacccaacttctgctgttcattgcagctgttttgaactatgaagaggatctcgatcctacactcgtgtgtcagttcaattactattttagatgcatgttgtcgctgtgttgttgcactgccaggtagacgtgcatgcgtcatcaaagctca

SEQ ID NO: 9291 - DNA, 419 bp, Triticum aestivum
  Clone ID: LIB104-063-Q1-E1-G7
atttgacacaaagaaaaatgtcacggaaatggtgccccgaaaaatttcccggccaaggatgcaacgcaaagagccaaatccgtggggggtttgacgctcctcgtgtcactgatgacctgttgatgaagaaggcatattttaggaagcaacaacttgacaacaaaacaacatcacctaactctaactgaagaggacagcccgtgtgatttgcgcttacattgatatcgcatgcgtatgaataatggtccaatggaattgggagcggagtaagaagctcatgttgcctttatgcatgtaataatcatgcctgcctgcatggcccgctagctgttggtccaatgcctggctgcctgcctgaactggcgtcaatttccagtttgtttttgtaatatataataactcttctgtattgtgcatta

SEQ ID NO: 9292 - DNA, 450 bp, Triticum aestivum
  Clone ID: LIB104-063-Q1-E1-G9
tcaagaagtcccgggtcgacagtcaattaaatgtgtttgtccaacggtcccagaggataggcttgtcaactgtagacctttccacctcctgtgtgccactgtggcaacccctttttcctataaaaggaggcccgaggtgaccaggagggggattcggctcttttgggcaaagttgcaccccgtagctagctcaagaacacaagaacactcgaatacatccaccaaagcaggactacggtattacgcatctttgtggcccgaacctgggtaaacgatatgtgtgcttcctgtagacccgctcttcgcacaacctcgcacccgccaaccataaaagggatcccagtgaccccataggtgtcgtttccacttacttctctggcgcgccaggtagggcgcgcaattgtgagaatctggtctggtcggggcagcgacttcattatggctgtcatt

SEQ ID NO: 9293 - DNA, 397 bp, Triticum aestivum
  Clone ID: LIB104-063-Q1-E1-H2
gggtcgacggggacaacaatgacctgaggagcaggcaccagcgcaagatcctggagcgcgcaaggaagatgtcagagaagattgggatgctggaagtggaaatgcagaaggtccagcaggccctggtgaagtatgaggaggagcagacgacgtcgaaaaccgtggttcagcggtccaaggtgcaactggtggactatctctacggtcgaaggcgggaaagccggaagccgcggttctcgccctgcggttgcatgagagcgaaaaccattgatgactgactctgccttcgttcgcgccgctcctttttttgaaggcggagtgtggaacgttggggttttcagtttcagatggagcgactcattagttcatgtctttctacgtaaatacagaaaaaaga

SEQ ID NO: 9294 - DNA, 472 bp, Triticum aestivum
  Clone ID: LIB104-063-Q1-E1-H4
gtacggtcagggggtcgacggggatggtcctgttgtccttgacatgacttccatgtggatgggcatgacagtcttgaagggcaaaggcatgggtcgctactgggcgtcattcataactcctggcaaagccgcttcccaggcagtgtaccatattccacggacatttttggtctccaagaacacccgattgggtgtacttgaggatgagcttggcaagcctggaggcataatcatcgagacagtgaggagagatgacatctgcgtgttcatctcggagcacaagcctgcacagataatgccatgggataagcatggatgccagattaagctcatagccgttgaccacaacactcggggattcgtgaactgccccccgaagaagaccatccaggaggtagtctttgccagcttcggcaacccggtggggtcatgccggaacttcactgtaggaacctgtcacgttcccaatgcg

SEQ ID NO: 9295 - DNA, 336 bp, Triticum aestivum
  Clone ID: LIB29-001-Q1-E1-A1
ccaccagatctcagagatgcctgatcttgctttcaccatagcacacaagactttcaccttgacgccagagcagtacgtcgtgaagctggagcaatcaggccagaccatttgcatcagtgggttcatggcgttcgacgtgccgccccctcgcggtccgctctggatacttggagacgtcttcatgggcgcctatcacaccgttttcgacttcggtgagagcaggattgggttcgccaaatccgcgtgaggacttggtgtatcaaggttcatggccggtattgtacatactgcaagcacgtgcaagttgcaaggtcaacaataaacttatacggagta

SEQ ID NO: 9296 - DNA, 433 bp, Triticum aestivum
  Clone ID: LIB29-001-Q1-E1-A4
gcggtcggcttcacgggtcgacggacaagaaacagtagaacacgatgcgggagatcaaggtgcagaagctcgtcctcaacatctccgtcggcgagagcggcgatcgcctcactcgagctgccaaggtgttggagcagctgagcgggcagtcgccagttttctccaaggcgaggtacactgtcaggtctttcggcattcgtcgtaatgagaagattgcctgctatgtgacgatcaggggtgagaaggcaatgcagcttctcgagagtgggctgaaggtgaaggagtacgagctcttgaggaggaacttcagtgacactggttgctttgggtttggtattcaggagcacattgatcttggcatgaagtatgacccatcaaccggcatctatggtatggacttcttcgtgggtctggagcgagctggataacgcgt

SEQ ID NO: 9297 - DNA, 395 bp, Triticum aestivum
  Clone ID: LIB29-001-Q1-E1-A5
actggtaatacaaaaaatgagcaatgatatttatcagtcagtatcaggcgtacaccgtctccgctctgttatcgcattggacatcaatattccatcatccactctactgcctctaatagcaaagaggtcgagatatatttcggtgctggagttaagtggcctacccattgagaaggttccagatggtattggagatcttttcaatctccgctatttgggtctgcgtggttcaaaagtgaagctccttcgcaggtctatcgagaaactttcaagtttgttgacactggacctttcagggtctggcatgaacgagctgcctagaggcattggtgaactataaaagcttaggcagttattcactgacaaagctattgatcgatttacgacagatttcg

SEQ ID NO: 9298 - DNA, 432 bp, Triticum aestivum
  Clone ID: LIB29-001-Q1-E1-A7
acggtaaggatttcccgggctcgactacctgatccactccaagtgggtgccctgcctcgagttcagcaaggttggcttcgtctttcgtgagcacaacagctcccccgggtactacgacgggcgatactggacaatgttgaaactgcctatgttcgggtgcaacgacgccacgcaggtgctcaacgaggtggaggatgtcaagaaggagtaccctgacgcctatgtccgcgtcatcggcttcgacaacctgcgccaggtgcagtgcgtcagcttcatcgcattcaggccaccgggttgcgaggagtctggcaaggcctaaactacgagttgaagcaatggcctatgtatgagtgtcctttgtgaacttcacttttgtccaggactctgctttccgaccagagcatatttttcgttcggtaagatctgtgtttg

SEQ ID NO: 9299 - DNA, 371 bp, Triticum aestivum
  Clone ID: LIB29-001-Q1-E1-A8
ccggctcgacagcttcccaagacaagccatcgacgttttcggtgcactgcgtgctcgggcgtacgacgactatgtgcgcaagtgggtgacctctaacggtatcgagaacattggcaagaagctggtgaactcgcgggacggaccagtgacctttgagcagccaaagatgacagtggagaagctgctagagtacaggcacatgctcgtcgatgagcaggacaatgtcaagcgtgtgcagcttgctgacacctacatgagccaggcagctctgggtgatgctaaccaggatgcgatgaagactggtaccatctacggtgaaagggcacatcatggtactttgcctgtaccggcaggatgcaccgatcggactg

SEQ ID NO: 9300 - DNA, 430 bp, Triticum aestivum
  Clone ID: LIB29-001-Q1-E1-B3
ggtcggactcacgggtcgacctccgttggcgagaacggtaagcttgtcgatgtcgggtggccgtctgtctgggtcaggatcgcgacccagtgggcaacggcaggtctgttcatctggtccctcgttgctcccctcctgttcccagacagggagttctagatcgacctggttacctgctaagagtgcatcatccgtttggagcacctacttatcgtatcgaacgtgtttcggctgtgatgatagctaagctgactatctgtatctggtctgtaatattgtgtgagcaaacccatggcaaggagctggtgtttgtgtgacgttgttgagtctggtttgcataatgtgtgacctaaggcattgttgccagtatttcaacagtgaagatacgctctttggttgtatatatattgaagttgatcattctctgttg

SEQ ID NO: 9301 - DNA, 452 bp, Triticum aestivum
  unsure at all n locations
  Clone ID: LIB29-001-Q1-E1-B4
ccggtccggatttacgggtcgacatgcaggaaggaacacttgaaatcgggattgagtacaggacagtttctggagttgctggtcctcttgtgattcttgacaaagtgaagggtcctaaataccaagaaatcgtcaacatacgattgggagatggcacaactaggcgtggtcaggtgcttgaagttgatggagagaaagctgtggttcaggtttttgagggaacttctggtattgacaacaaatatacaactgtgcaattcactggtgaggttctaaaaactccagtatcactggatatgcttggccgcattttcaatggttctgggaaacctatagataatggcccaccaattttaccagaggcgtacctggatatttccggaagttctatcaatcccagcgaacggacataccctgaaganatgattcagactggcatatctacaattgat

SEQ ID NO: 9302 - DNA, 419 bp, Triticum aestivum
  Clone ID: LIB29-001-Q1-E1-B5
gggtcgactacctgatccgctcaaagtgggtgccttgcctcgagttcagcaaggttgggttcatcttccgtgagcacaacgcatcccctgggtactatgatggccggtactggacaatgtggaagctgcctatgttcgggtgcaccgacgccacacaagtgatcaacgaggtggaggaggtcaagaaggagtaccctgacgcgtatgtccgcatcatcggattcgacaacatgcgccaggtgcagtgcgtcagcttcatcgccttcaagccaccgggctgcgaggagtccggcaaggcctaaacagctcactcacgacaggccatatataaagtgccattgcagttttgtcaactctgacattgctttgggttttccttctccatttatctttcttatttgttcctaagaatatgtgta

SEQ ID NO: 9303 - DNA, 386 bp, Triticum aestivum
  Clone ID: LIB29-001-Q1-E1-B8
gggtggactacctgatccgctcaaagtgggtgccttgcctcgagttcagcaaggttgggttcatcttccgtgagcacaacgcatcccctgggtactacgatggccggtactggacaatgtggaagctgcctatgttcggatgcaccgacgccacgcaggtgatcaacgaggtggaggaggtcaagaaggagtaccctgacgcctatgtccgcatcatcggattcgacaacatgcgtcaggtgcagtgcgtcagcttcatcgccttcaagccaccgggctgcgaggagtccggcaaggcctaaacagctcactcacgacaggccatatataaagtgccattgcagttttgtcaactctgaaattgctttgggttttcctctccattc

SEQ ID NO: 9304 - DNA, 386 bp, Triticum aestivum
  Clone ID: LIB29-001-Q1-E1-C1
ccacctgtgctgagaaatcgacggccagcacctcacctccgccgccatcctcggccacgacggcagcgtctgggcgcagtcccccaacttcccccagttcaagcctgaggagattgctggcatcattgaagactttgacgaacctggacaccttgcaccaactggtcttttccttggaggcacaaagtacatggtcatccaaggtgaacctggggttgtcatccgaggaaagaagggcaccggtggcatcactatcaagaagacgggcatggccctgattctcggtatctacgatgagcccatgactcctggccagtgcaatttggtcgtggagaggcttggcgactacctggtcgaacacggtttctaagcccgccctgatatgc

SEQ ID NO: 9305 - DNA, 362 bp, Triticum aestivum
  Clone ID: LIB29-001-Q1-E1-C11
ggaggagttctcccccaatccctcgttcccctccgccctacacgttctcgcccacgtcgccgccgccagctcctccccctttcgccggagctcctttctccggcagtagagatggtgaaagacgcagtccgctatgagcctggaccggcgtttcaggagagtggagagcagggcaagcttgagataccagcatctggctccacagaattttggctaatacagtggcctcgaaaccatgtaaatgcttctgattttaatggtcaagaagtttctcttaataagcatcatgacgatggaaacttgggaaatttggagagttcttcggggaaatcatatgaactcgttagctttgctgctcaaca

SEQ ID NO: 9306 - DNA, 444 bp, Triticum aestivum
  Clone ID: LIB29-001-Q1-E1-C5
ccgggtcgaccgccgcggctaactagtgctacgcaaccgtcgcgccccgtgcccgctcctccaccatcgtcgccagcctcggcacccccgcgccctccaactcctcctccttccgccccaagctcatcaggaacaccccagtccaggccgcgcccgtcgcacccgcattgatggacgccgccgtggagcgcctcaagaccgggttcgagaagttcaagaccgaggtctacgacaagaagcccgatttcttcgagcccctcaaggccggccaggcgcccaagtacatggtgttcgcgtgcgccgactcccgtgtgtgcccctcggtcaccctgggcctggagcccggcgaggccttcaccatccgcaacatcgccaacatggtcccgtcctactgcaagaacaagtacgctggtgttggatcggccatcgaatacgccgtctgtg

SEQ ID NO: 9307 - DNA, 357 bp, Triticum aestivum
  Clone ID: LIB29-001-Q1-E1-C6
gacacagataatgatggagaggattaactacgaggaattctgcgctatgatgagaggagggatgcagcagccaataaggctcaagtagtctttccttgtagaaatggtgtaccattagcaactgttcttggttccttttttttcgctgctgcacggatgagaagttctctttggcgttgttgagatgattgtgtatatcttgtggccttttgctcgtgcatgttgttcctcaagtgttttggacctactttctgtaagttggtttttgcaagtacatctaataaaagagtatttttgcacgtcaaaggtgcatatttaaaaaaaaaaaagaactaaaaaaaaaaaaagcggccgctc

SEQ ID NO: 9308 - DNA, 269 bp, Triticum aestivum
  Clone ID: LIB29-001-Q1-E1-C8
tgatcagctaagagtgggtgccctgcctcgagttcagcatggttggcttcgtctttcgtgagcacaacagctcccccgggtactacgacggccgatactgggcaatgtggtatctgcctatgttcgggtgcaccgacgccacgcatgtgctcaacgaggtggaggaggtcattgaaggattatcctgacgcgtatgtccgcgtcatcggtttcgacaacctgcaccaggtgcacttcgtcagcttcattgcattcaggccacctggttg

SEQ ID NO: 9309 - DNA, 388 bp, Triticum aestivum
  Clone ID: LIB29-001-Q1-E1-D12
gacaacttacaaggcttgaaggggagaagagcagctccaagaggtcgggcagcaaacatggcattctgctgcccacacagcaccacatccctgcgctccccatgcaccaccatcccaaactctggcttcaggcagaaccaagtcatcctcttcacgaccagaagcagcaggaggagtaacacgaggcatggggcaaggaccttccaggtctcatgcgcagttgagcagccaatagtgattggcctggcagcagactcgggatgtgggaaatccaccttcatgcgccggctcacaagcgtgtttggaggtgctgcagagccacccaagggcggcaacccagactccaacacgctcatcagcgacacgacgacggtcatatgccttgatg

SEQ ID NO: 9310 - DNA, 437 bp, Triticum aestivum
  Clone ID: LIB29-001-Q1-E1-D6
tacggtacggatgttccgggtcgactacctgatccgctccaagtgggtgccttgcctcgagttcagcaaggttgggttcatcttccgtgagcacaacgcatctcctgggtactacgatggccggtattggacaatgtggaagctgcctatgttcgggtgcactgacgccacacaggtgatcaacgaggtggaggaggtcaagaaggagtaccctgacgcgtatgtccgcatcatcggattcgacaacatgcgtcaggtgcagtgcgtcagcttcatcgccttcaagccaccgggctgcgaggagtccggcaaggcctaaacagctcactcacgacaggccatatataaagtgccattgcagttttgtcaactctgacattgctttgggttttccttctccatttatctttcatacttgttcctaagaatatgtgtat

SEQ ID NO: 9311 - DNA, 308 bp, Triticum aestivum
  Clone ID: LIB29-001-Q1-E1-D8
accggtacgatattccgggtgacggtggtctttaagctgtcgggactcaattggccaatcaccttctaggtgctgaccttctacgtgcgcttactggcagggactggagcaacgatctttctactatttcgtccacatcagagatgccttagcgtcgatgacggttaacatcatgtaggaattggcctctgtggcatccaccttcagatcctgcttatcatgttttcacgaaacagcatgacgaggacttcgccaccactctgccgcactacactttacaatgctgcggcattccggtaccagcagcc

SEQ ID NO: 9312 - DNA, 338 bp, Triticum aestivum
  Clone ID: LIB29-001-Q1-E1-E1
gtcggaataccgggtcgacgtcgacgtcatcgataaattgtgcgtctcgactaacatcactagtctcgcgcatgacacacatttgagcatgttcaagaacttgacgagcaaggtctgcgtttattgcaatgttgggagacacactcacaactcttccacggtttcccacaggcagctctagactctcggagtcgcatgtcacattggttgcattggtcacggcaagtatcgtcaggacacgcagcacggcgctaatttcacaagtttgagcgctcattacaatgacgattaggtcggtcccacacgcacatgtgtcgtctctatagtttctaggcact

SEQ ID NO: 9313 - DNA, 443 bp, Triticum aestivum
  Clone ID: LIB29-001-Q1-E1-E7
gggccgacgaggccttccaagcaaagtatgatgtcaagccgaacaatgccattctcgccgacgacaagcacttgcccatgtacgatgagttgtccaacaaggaaaatgttgaatacattgctggaggagccacgcagaactctatcagggttgcccaatggatgcttcaaactcctggtgcaacaagttacatgggttgcattggaaaggacaagtatggtgagcgagatgaagagcgccgctaaagctgcaggagttactgctcattactatgatgatgacgctgctcctacaggcacatgtgctgtatgtgttgttggtggtgaaaggtcattgattgcaaacttatctgctgcgaactgctacaaatctgagcatctaaagaatccagagaactgcgcactagttgagatagcaatatacatctacattgctggcttttt

SEQ ID NO: 9314 - DNA, 399 bp, Triticum aestivum
  unsure at all n locations
  Clone ID: LIB29-001-Q1-E1-F1
gggtcgacaagaaccttgtcctattcgacatctcgatccccgaccggattcgctacttcgacgctccgccagatctgttcgtctacacggcctctgctcctcnccccccggtgcagcagcttcctcggcgcagcacaaagcagttcctggctcatcagttcaccaccggcattctgcagctcaaagcggagcactgctacatcgttgccgacctcaatgtccacctcaagaaagagggcgctagtgctgaactctgtgtcttcaactccggcgccaccgattggagaatcatcaccgaggtgcttgctgataagctccctgacctctggtttaccgatgatgtgtttgctttcgatggccgtttcctttgctgggtggactacttcaaccgcgttgtgc

SEQ ID NO: 9315 - DNA, 424 bp, Triticum aestivum
  Clone ID: LIB29-001-Q1-E1-F11
attcccgggccgactacctgatcagctccaagtgggtgccttgcctcgagttcagcaaggttgggttcatcttccgtgagcacaacgcatcccctgggtactatgatggccggtactggacaatgtggaagctgcctatgttcgggtgcaccgacgccacacaagtgatcaacgaggtggaggaggtcaagaaggagtaccctgacgcgtatgtccgcatcatcggattcgacaacatgcgccaggtgcagtgcgtcagcttcatcgccttcaagccaccgggctgcgaggagtccggcaaggcctaaacagctcactcacgacaggccatatataaagtgccattgcagttttgtcaactctgacattgctttgggttttccttctccatttatctttcttatttgttcctaagaatatgtgt

SEQ ID NO: 9316 - DNA, 358 bp, Triticum aestivum
  Clone ID: LIB29-001-Q1-E1-F3
ggtccggcactcacgggtggacgatcttgacgacggactcgtcgctgacattgtcggtctggaagatacccttgcagacaccgatacggtcgtcgcgggtgggagcccagtagaacttctccatacgaccatcacggatcagaggggcgtacaacgtcgagaaatcgttaccagtgacgacgatgggcacacgtgggttctcctccttgttgtacatgcctgggagctgcacattggtgggggcatcggcgatgttcatgagggtggcgttcaccatctggttgttgacggtgtactgtgtggtcccgcccatcctacccgcaccggcgtcaagatcgttgatgaagaggcgtcgacc

SEQ ID NO: 9317 - DNA, 457 bp, Triticum aestivum
  unsure at all n locations
  Clone ID: LIB29-001-Q1-E1-F6
tcccgggtggacaagctcaaagagcaaaagagattaatagaaaaggcagaggaagaggagcgcctaataaaagagaaggaagaaaagagaattaaagaagaagctgaaaaacaagcagctgaggaaaacaaagcacctgatgcctctcaggaagcagattctcaggacactaatgagaaggcacaagaagatgaaagcaaggtagttgaacatcatgatggagatatcacggaccatgacaatcactcaccagaaggcgagacatctgttgaagtgcctgacattaaagctgggactggagatgatgaaccaccggtggagacatctgcagtacctaccgaggagcaggaccctacttctgtcaactctgaaggtttgtcanaggcggaattgggtcgtctggtagcttctcgctggactggagaaaatgtagatgatgttggtaaaagcgataaaa

SEQ ID NO: 9318 - DNA, 328 bp, Triticum aestivum
  Clone ID: LIB29-001-Q1-E1-F8
tccggctcgactgccaggccaaggagccccagggcggcgtcctcgtcttcgtctccggcaccatcaccaccggtcccggcgagcagcccctcaagttctcacagatgttccatttgctgccagctggagggagcttcgacgtgcagaacgacatgttccgcctgaactatggctaaggaagggcgaccgctctggaggcaggcagcctgttgagggatttatgttagcacagggaagatcaggtggatatgctgcaggagtcgttgggtggtcggcagcttgtgcaggttggcgcaggcggttgccacggcttggggaggcagcgacg

SEQ ID NO: 9319 - DNA, 395 bp, Triticum aestivum
  Clone ID: LIB29-001-Q1-E1-G1
attgggtgccttgcctcgagttcagcaaggttgggtcatctccggttacacacgcatccccggggtacaacgatgggccggtaatgggacaaatgtggaaagctgcctatgttcgggtgcactgacgccacacaggtgatcaacgaggtggaggaggtcaagaaggagtaccctgacgcgtatgtccgcatcatcggattcgacaacatgcgtcaggtgcagtgcgtcagcttcatcgccttcaagccaccgggctgcgaagagtccggcaaggcctaaacagctcactcacgacaggccatatataaagtgccattgcagttttgtcaactctgacattgctttgggttctccttctccatttatctttcttatttgttcccaagaatatgtgt

SEQ ID NO: 9320 - DNA, 414 bp, Triticum aestivum
  Clone ID: LIB29-001-Q1-E1-G10
cccggctcgacaccttcacaagacaatccatcgactttttcggtgctctgcgtgctcgggtgtacgacgacgaggtgcgcaagtgggtgacctctagcggtatcgagaacattggcaagaagcttgtgaactcgcgggacggaccagtgacctttgagcagccaaagatgacagtcgagaagctgcgacagtacgggcacatgctcgtccaggagcaggacaatgtcaagcgtgtgcagcttgctgacacctacatgagccaggcagctctgggtgatgctaatcaggatgcgatgaagactggttccttctacggttagaacattctccatacacacccaccatctcttgctgcatatgacgaggtaaaggggcacagcaacgtactttgcctgtgccggcaggatgcaccga

SEQ ID NO: 9321 - DNA, 367 bp, Triticum aestivum
  Clone ID: LIB29-001-Q1-E1-G5
ttccgggtcgactgctaccaccaagacttcaagcatctcagctggtcacaggcgagcgttggctctatcaggtggtatcaggtttccacgatgcgcggtgagattctacagtgtttcctcggttacatcgactccgttcggcatacctacagtccacacgccggccacaagggcaactacggctagttcatcatagccgaaccgctcggagccattgcacagtcgttctagggttttactttggtgaatttgcggttgcatcgtcggtatagttgcgggtcttagcgtctagtcatttatagtttcgagttctggtcatgagttgtcacgcagtcgccgcaccgatcatcatcgcccctgccagcta

SEQ ID NO: 9322 - DNA, 422 bp, Triticum aestivum
  unsure at all n locations
  Clone ID: LIB29-001-Q1-E1-G7
gggcggacatcgatttcaaagcaatggagcacaagagccccgagcatctcgtcagaaaccccttcggccaaatccctgccttccaggatggggatctgcttctcttcgagtcacgcgcaattgcaaagtacgtgctccgcaagtacaagaagaacgaagtggacctgctgagggaaggcaacctgaaggaagcggcaatggtggacgtatggacggaggtggacacgcacacctacaacccggccatctcgccgatcgtgtacgagagcctcatcaacccgctcatgcgcggcctgccgaccaaccatacggtggtggacgagagcctggagaagctcaagaaggtgctggatgtctacgacgcgcggctgtccaatcacgagtaccccgctggggacttcntcagcttcgcggacctcaac

SEQ ID NO: 9323 - DNA, 427 bp, Triticum aestivum
  Clone ID: LIB29-001-Q1-E1-G9
aggtaccgatctacgaattcgcgactcgacattgtgacaaaaaagagcggcacctcttattgattgtgtgtgtgtgtgtgttgaggaggggcgattcaaatcagtggggtgaacttgtggtagtgtcgtgtatgtattttcaaccataaataggtagggaatggtagaaaaatgtgatataaagtgagagagaagtggacaacaagagagaataagataatggtgatgcaagtcagagaatcggaactatgcaacatgcaaaatcacaaaaaagaggggaaattatttcgaaaaagggaaaaaagggtgcaatggccatatgaatggtgccctaccgcatgggttaaagttctcaatggcacaatggaaacacctcgtggtgcagagtcccacatatgtgtgtttagccataatataagtagataga

SEQ ID NO: 9324 - DNA, 457 bp, Triticum aestivum
  unsure at all n locations
  Clone ID: LIB29-001-Q1-E1-H1
ggtcggaataccgggtcgacgacgccttcctcgctaagtatgatgtcaagccgaacaatgccattctcgccgaggacaagcacttgcccatgtacgatgagttgtccagcaaggaaaatgttgaatacattgctggaggagccacgcagaactctatcagggttgcccaatggatgcttcaaactcctggtgcaacaagttacatgggttgcattggaaaggacaagtatggtgaggagatgaagagcgccgctaaagctgcaggagttactgctcattactatgaggatgaggctgctcctacaggcacatgtgctgtatgtgttgttggtggcgaaaggtcattgattgcaaacttatctgctgcgaactgctacaaatctgagcatctaaagaagccagagaactgggcactagttgagaaagcanaatacatctacattgctggctttttcct

SEQ ID NO: 9325 - DNA, 407 bp, Triticum aestivum
  Clone ID: LIB29-001-Q1-E1-H2
cgcttaaagttgtcctagatgtaagaaatcagccattgcttattcactgcaagagaggcaagcaccgaactggatgtgtcgtcggttgcatgaggaagttgcagaaatggtgcctgtcttcggtcttcgatgagtaccagcgcttcgccgctgcgaaagtgaggagcaccgacctgagattcatggagctgttcgacgtctcgagcttgaagcacctgaccaactcacattgttaacccagggcgagtgatcgctcgcccccgacgtcctcccagattctagtacatctccatgctgtcctccggcggtcactgaaccgaatcagcagtgaataacttttggaacccgtagaatgaatccatgagatagtggcgagacctctgcataaaataagattgaagaagaac

SEQ ID NO: 9326 - DNA, 275 bp, Triticum aestivum
  Clone ID: LIB29-001-Q1-E1-H5
tccgggccgaccattctacacaaactgttcagtgacgcgtatcagaggtacttgcgcataccactgtccgatatacctctggtattctgtgcactgcccttgaactgtccaatggtcatgacatagatgtacactctgtgccagcagggttgcttcaaagatttgtcagactactcggtgctggagataccgaggttccttacgtccttgatgctctagcaaggaaattgcgagcgccacggcggcctcaggatgcgctcgtcattacaactatg

SEQ ID NO: 9327 - DNA, 460 bp, Triticum aestivum
  Clone ID: LIB29-001-Q1-E1-H6
cccggctcgactacctgatccgctccaagtgggtgccctgcctcgagttcagcaaggttggcttcgtcttccgtgagcacaacagctcccccgggtactacgacggtcgatactggacaatgtggaagctgcccatgtttgggtgcaccgacgccacacaggtgctcaacgaggtggaggaggtcaagaaggagtaccctgacgcctatgtccgtgtcatcggcttcgacaacctgcgccaggtgcagtgcgtcagcttcatcgccttcaggccaccgggttgcgaggagtccggcaaggcctaaactacgagttgaaacaatggcctatctcgtatgaaggtcttttgtgaacttcacttttgtccacaactctgctgcacgactctgctttcggaccggatcataccttttgttctatatgatttgtgtacgtatgtacgaacataggttcttgagca

SEQ ID NO: 9328 - DNA, 412 bp, Triticum aestivum
  Clone ID: LIB29-001-Q1-E1-H7
acagcgagtatgatttagctacccatgcatgcaactattggatatgtgatggaatcatacagaaagacacagacattgctgaagcatggcaagttggtgagagactgcaaggtgatatccgatggaatatggactaccgcgacaatgaatttccctctcgctttctatggtatgccgagtgcgtaccacactgggcatcaccagctcatggatttgtgctggtccctgatggagtcgttcctagcagaacgttccagcattttgacaagcttggcgtgatgaaactctcaaggtgtagcttcagcttttcatcacctccatttctctgctgccacagccttagatttttatggcttgaccactgtcaaaacctaggaaagagaaatggggcgcaatttggagaagaggacac

SEQ ID NO: 9329 - DNA, 359 bp, Triticum aestivum
  unsure at all n locations
  Clone ID: LIB29-002-Q1-E1-A3
ccaaactggttgagaagcctgacatgctgttcgggaagcgtgggaagagtggccttgtggcactcaacctggatgtagcccaagtcaaggagtttgtgaaggagcggttgggagtcgaggtcgagatgggtggctgcaaagctccaattaccaccttcatagttgagccgtttgtcccccacgatcaagagtactacctttcagttgtgtccgaaaggttgggtagcaccattagcttctcggaatgtggaggcattgaaatcgaggagaactgggacaaggttaagacagtctttcttccgactgagaagccaatgacacctgatgcttgtgctncccttgattgcaaccttccactg

SEQ ID NO: 9330 - DNA, 441 bp, Triticum aestivum
  Clone ID: LIB29-002-Q1-E1-A4
ggtcggaataccgggtcgactcctgcgtctcaggccaaacccttcacgaacttcatcttcgagcaaaagatggcattctctctgcccggttgctgaccatcttcgctctgatgctccctcatccactcctggatgaaaaaaactgcattacataaaggagtacaatcgccagcgttactcgtactaatttgcatcacacagcctatcttgaaaataagttcaaatatctatatgggagaaagtcatgtacgtgtactatgaaaaagtttgtgtacgaaattgctgatgacattattatcgatgtgttcatttatataacacacatagagagttaatagcatatagatccttcaaaaatagtaggggtccatttggacaaacaacgggtattcgcaaaatagtttaacaggataatgaaaaaagttaacagttctcacaaga

SEQ ID NO: 9331 - DNA, 445 bp, Triticum aestivum
  unsure at all n locations
  Clone ID: LIB29-002-Q1-E1-A5
gggccgacaatggattcaacggatggaaagcaggactagagagaggttggcttcagaggactcatggtcatacaaatcctatcattaattcaagtggtctccggatatatatccccatgatggagtacactagtataaataattgttctatgccaatcaacaacgttgagtggctcgtgaaccaccggcagagtcgttccaagtgttaattatttccagttctccctccattcgcacacatagctccactacttctctattatcggatgtaataatgatgcttagttcgtgatatgcttgatagtgtgcgtctttgcatactacgtgacatgtctctagcangcaggcatgttggaacatgacaatatggagacatagtccagagcatttgcctttgtacttcaatatcagacgttgtcaataattgggcatctacctttttccc

SEQ ID NO: 9332 - DNA, 422 bp, Triticum aestivum
  Clone ID: LIB29-002-Q1-E1-A6
gtatatcgaagtcctagataggaaagtagagtaggcacagatcctccacaaaaggcaaaatgtatatgaaaaaaagattgattgaactttccaacggactcattcgatgagtaaacgattgaatgggattcgcttgggcaacgaaatcaagtcctggtccccttttctctcttattgaattaactaattcatttcctttttacttttggatttttttttgatttgatttggcattattcaacaataaaaaaagaaaaatttcgacaaattccctttttttaattatgtgataattatgagaaccaatcctactacttctcctcgcggggcttccacaattgaagaaaaaagtacaggtcgtatcgatcaaattattggacccgtgctggatgtcacttttcccccaggcaagttaccttata

SEQ ID NO: 9333 - DNA, 423 bp, Triticum aestivum
  Clone ID: LIB29-002-Q1-E1-B1
ggtccggagctaacgggtggacgcactctaccctggaggaagctttgacccgcttggcctggccgacgaccccgaggcatttgcggagctcaaggttaaggagatcaagaatggccgcctcgccatgttctccatgtttggcttctttgtgcaggccattgtcaccggcaagggcccattggcgaaccttgccgaccacattgctgaccctgtcaacaacaacgcgtgggcattcgccaccaacttcgcgccggggaagtaagacatgaatgatggttgggagttgtatgtgagtgtcagttgaattgtaacaccaacatgttaaatatgagaattgtgtgcaaagacattgtttgattggtccaaaacgaggcaacaaaacacatctaaatcggcataaaaccaaaaaaaagcgggcgctct

SEQ ID NO: 9334 - DNA, 408 bp, Triticum aestivum
  Clone ID: LIB29-002-Q1-E1-B10
gggtcgccgacgactggccaccagatctacaagcttggaggcattgacaagcgtgtcatcgagaggttcgagaatgaagccgctgagatgaacaagaggtctttcaagtacacgtgggtgcttgacaagctcaaggccgagcgtgagagaggtatcaccatcgatattgctctctggaagttcgagaccaccaagtactactgcaccgtcattgatgctcctggtcaccgtgacttcatcaagatcatgatcaccggtacctcccaggctgactgtgctgttctcatcatcgactccaccactggtggttttgaggctggtatctccaaggatggtcagacacgtgagcacgccctccttgctttcactcttggagttaagcagatgatctgctgctgcaagaagatg

SEQ ID NO: 9335 - DNA, 430 bp, Triticum aestivum
  Clone ID: LIB29-002-Q1-E1-B3
cgggtcgacaccttcaaatggatatttgatgagtttgttaagatgatgggaggaaaaagaccaattaccattttgacagaccaagccagggcaatggaggtcgctattgcggacgtatatccagatgcgacacacagatggtgcaagtggcacatcctcaagaaggccaaagagagcctggggtctaattacaccaagaagtctgatttcagggcagaatttcacaagctggttcacgaaatgctcactatcgaggagtttgaggacgggtgggcagcgttgcttgagaagtattcactgaagaataacacatacctgatgcaaatttacaagacaagacagaaatgggccaagccatactttgcagggaaattctgtgcgaggcaaaccagcaacgggaggagtgagagcgcaaatcacatgttgaaat

SEQ ID NO: 9336 - DNA, 393 bp, Triticum aestivum
  Clone ID: LIB29-002-Q1-E1-B4
gccataggatcaggggactggttcaagaccatcatcagcaggaagaagtcgaaccggggcaagtcaaagcacgcacaggttgctgcacaacgcaatggagccaacctgccgcatcacaagccgagcaacgctccatcttccagcatcgaccctcaagacaccgcagcactggaagactgggcaacgacccggattcaaaacgcgtttcagcgccacaaagcaacgaggacgctccgttgcctgaagcgacttcaaccactgagcattgttgggcacagcaatcgagttaccagccagaccagtgccacactgaactccataaattcgttccacaagtctaaggctgagcctacacaacggcgtgccttcatcgtccccgatgggctcaacacg

SEQ ID NO: 9337 - DNA, 383 bp, Triticum aestivum
  Clone ID: LIB29-002-Q1-E1-B5
ccgggcggacatgcatagagagtacgcggatggctcttgcccgtgtcaagacatactgggcagagatgaaggccaccgatgttgcatccccagattcggacggaagctgagtacctatcgagcaatattttcaggaagttctgcatggcgctcgtttaatagagacgcagtgcttgaaggatattatgttcgaataacatgtattattgtgaaacaatgtttcgatgtaatataaaagctttttatacttgtgccttcaagaattaaaatacctcctgtgcggacgttaatgtatatgtgtatataacccgactgatggcagtcttcggcttcagcccccacgcatataatgccgggggtgtatggcaaaatgtgcattttca

SEQ ID NO: 9338 - DNA, 464 bp, Triticum aestivum
  unsure at all n locations
  Clone ID: LIB29-002-Q1-E1-B6
gggtggactacttgattcgctacaagtgggtgccctgcctcgagttcagcaaggttggcttcgtcttccgtgagcacaacagctcccccgggtactacgacggtcgatactggacaatgtggaagctgcctatgttcgggtgcaccgacgccacacaggtgctcaacgaggtggaggaggtcaagaaggagtaccctgatgcctatgtccgcgtcatcggcttcgacaacatgcgccaggtgcaatgcgtcagcttcattgccttcaggccaccaggctgcgaggaatccggcaaggcctaaagtgcaagttgaagtaaccgatatacatgtcatgttagtcacatttgtcggcggctctgctttctcagttttacttctcgttctactcatatgtgaatatatgagcatatgtatgtaagcacttaccaatgtaggtcgangaggatgcatatgagagatata

SEQ ID NO: 9339 - DNA, 312 bp, Triticum aestivum
  Clone ID: LIB29-002-Q1-E1-B7
cccgggccgacaccttcccagaacaatccatcgactttttcggtgctctgcgtgctcgggtgtacgacgacgacgtgcgcacgtgggtgacctctaccggtatcgagaacattgtgaacaagctggggaactcgcgggacggaccattgacctttgagcagccaaagatgacagtggagaagctgctacagtaccggcacatgctcgtccattagcacgacaatcgtaagcgtgtgcatcttgctgacacctacatgagccaggcagctctgggtgatgcgaaccaggatgcaatgtggactggtgacttct

SEQ ID NO: 9340 - DNA, 443 bp, Triticum aestivum
  Clone ID: LIB29-002-Q1-E1-C1
ctctacatttcacacatccaggtgaaccaagcccaaaagcagaggcgccgtacataccgtgctcatggacgcatcaatccttacatgtccaacccctgccacattgagctgatcttgtcagagaaggaagagccagtgaagaaggaggctgacaacgtcgtcgcaccaaggaaagctatctaagctaacggagtggctgcattcgtccaagaatcttagttgtagttcttctcaagtacctttgttggcagtgtttgttgcctccttgatgtttttgttaccaacatggagtaaggatttgttaaggttgatgttatccttgtgattgcgagtggtccttatatgctaaaacagtttcagatatttgagcagtagcccaccagaacttatttctcagagatgctggacctttccggctgttcgagtattatatccactttttg

SEQ ID NO: 9341 - DNA, 421 bp, Triticum aestivum
  Clone ID: LIB29-002-Q1-E1-C4
cgggtcgacctgttggtactggagaaggttctactaagctcgtacatgatgttgactgccccatggatttcgacttttcaccttatgtgagtgctaatggaggagtcgaacaaaagtatgacttatatggagtcattcatcataggcagtatggcccaaaaggtgggcactattggtgcttcaccaagtataatggagaatggtacgagatcaatgacgaacgggttacatctatcactaaggagggtgtagaaaagaaaacaaagaaagttatatctttttctataaaatgaaaatgggagaacattctgaaccacatggcgagcgtgcaactgaagacgacatcccaagacggacggacgctgatcccttacttttcaggcccccacctgatgaagatacccccaggctatctgataag

SEQ ID NO: 9342 - DNA, 298 bp, Triticum aestivum
  Clone ID: LIB29-002-Q1-E1-C5
agacgacagaaggggagaggaacatcaggttttagcatcgcgatttccctagaagcgttgcgcggagaaatctcgtcggattgttccccgaattccagcgcaaagatgccgcgcattcccatgatcagattccccaagaggcatctcaaagtcccatccccaccagcggcgcagcctgcagatcagcacgcgaccctcatgtcccgattgggagctaaagtagaggcaccatcttctggagagaaaaagaattaccggttcagatcagatgtgccttccgcaccttctcataatgctg

SEQ ID NO: 9343 - DNA, 480 bp, Triticum aestivum
  Clone ID: LIB29-002-Q1-E1-C6
acggtcaggacttcccgggtggcctcctacggcaccgacaagatccccgacagggagatcctcaagctcgtgaaggagaactttgacttcaggcctgggatgatcagcatcaacctggacttgaagaaaggtggaaacaggttcatcaagaccgctgcttatggtcactttggccgcgatgatgccgacttcacctgggaggtggtgaagcccctcaagttcgacaaggcatctgcctaagaacaagaaatcacattggggttattcttggtctgctgcctatcaagttcgacaaaggcgggatccttttgctcctgggaagtaagaagaagcattcgacatcaccgcgacgtgctacactggtcgtgccgtctagtgatcagtgctaagttttcttactggtgtatcatttcatatatttttccttttctttttgagtgtgctgaaactgctgagtgatgtgcaatttgctctgtcact

SEQ ID NO: 9344 - DNA, 462 bp, Triticum aestivum
  Clone ID: LIB29-002-Q1-E1-C8
ttccgggccgaccagggttgccaagaccgatccaacgcctcgtccgacggcgctgccggccggcgatggatatggagaggagctcgggtcttccttgtgtatattagggcagcagtagttttagtttgtcttggcttcatgccgtggtctggcgttatgccgtggggatgcaaaccactggagctctcgagcggcgtctggtggtggcctccgtcgttttctttcttgccaccatggtggtggaaagtggaagacgccggatctggcaagatccccttgaataagctcgttctggtgttgtggtgttccctgatctggagggcatccaactgctactgcttgttttctcaggctaccatggtggtggatgagaagcaggatagttgcagaatcctgaagtttataggtcgagttcgagcatatcagcagaggtccctttggtggagcgacgggcgccatcga

SEQ ID NO: 9345 - DNA, 457 bp, Triticum aestivum
  Clone ID: LIB29-002-Q1-E1-C9
gggtggacatcgacatcgccaaaaagcataatgctgggacaaacaaagctgctcatagcaccacatcgctcaatacaaagaggcttgatgatgatacagagaatcttgctcatgagcgtgtgccgtcagacctgaagaagagcattatgcaggctagaacggacaagaagctcacacaggcacagcttgcacagctgatcaatgagaagccacaagtcatccaggagtacgagtcaggcaaggctatcccaaaccaacagatcatcggcaagctggaaagggctcttggcacaaagctgcgaggcaagaagtgaagctgcgtgcatctgacaggagtcgagtctttcaagagaggagcttggctgggcaagtttaccgctaaataaagcttgtctactaaatcatgcgacttaagaaaaccctggagtttggtatttcgctttggtttgggtgaatg

SEQ ID NO: 9346 - DNA, 385 bp, Triticum aestivum
  Clone ID: LIB29-002-Q1-E1-D2
gggtggccgaccgtgaacctgaagggggtggacacctccgccgtcctcgccgacgcctccagcaccgtcgcaaccatcatcggcaagccggagaactatgtgatggttgttctcaagggttcagtgcccatggcgttcggaggtacccaggagcctgcagcctacggtgagctggtttccatcggagggctgaaccctgatgtgaacaagaagctgagtgccggcattgcttccatcctggagtcaaagctgtccatccccaagtcccgcttctacctcaagttccatgattcaaagcgctcggactttgggtggaacggatcgaccttttagacgcctcatatggcgtggagtcctgtatgaacttcacagttcctagtattct

SEQ ID NO: 9347 - DNA, 427 bp, Triticum aestivum
  Clone ID: LIB29-002-Q1-E1-D8
gggtcgacggcaagatttatgatgtgaccgcgtatttggatgaccatcctgggggtgctgatgttctgcttgccgtgactggtatggatggcaccgacgaatttgacgatgcgggccacagcatggatgccaaggcgttaatgaacgattacttcattggggagttggacttggacgaagcacctgacatgcctgagatggaggttttcaggaaagagcaggacaaggacttcgccagcaagctggtggattacgctgtgcagtactgggccattccggtagcagcagccgggatatcagccgtggttgccatattgtatgcacggaggaagtgatgactggctatacgttgattgaagaaccatttttgggtaacacacacatttatagcctgttatggatggagaaattatgtacttcggtccaa

SEQ ID NO: 9348 - DNA, 440 bp, Triticum aestivum
  Clone ID: LIB29-002-Q1-E1-D9
cactaaccatcagatctacaagcttggaggtattgacaagcgtgtgatcgagaggttcgagaaggaagccgctgagatgaacaagcggtcgttcaagtacgcctgggtgcttgacaagctgaaggccgagcgtgagaggggtatcaccattgatattgccctgtggaagttcgagaccaccaagtactactgcaccgtcattgatgcccctggtcaccgtgacttcatcaagaacatgattactggtacctcccaggctgactgtgctgtgctcatcattgactccaccactggtggttttgaggctggtatctccaaggatggccagacccgtgagcacgccctccttgctttcactcttggagtgaagcagatgatctgctgctgcaacaagatggatgccaccactcctaagtactcgaaggctcgttatgaggaaa

SEQ ID NO: 9349 - DNA, 197 bp, Triticum aestivum
  Clone ID: LIB29-002-Q1-E1-E10
accttcacaggacaatctatctactttttcggtgctctgcgtgctcgggtgtacgacgacgatgtgcgcaagtgggtgacgtctaccggtatcgagaacattggcaagaggcttgtgatttcgcgggagcgatcagtcacctttgagcatctatagtcgacaggctagaaactgctacagtagtggcatatgcacgt

SEQ ID NO: 9350 - DNA, 420 bp, Triticum aestivum
  Clone ID: LIB29-002-Q1-E1-E5
gggtcgacagacgacagaaggggaccaccgctcccagcaacggaaccaacaaatcccaagctaatctcgtctccgatcgactcgaggcttgtcgaatcctccttccccaccgcctcaagatgcagatctttgtgaagacactgacgggcaagaccatcacccttgaggtggagtcgtctgacaccatcgacaatgtcaaggccaagatccaggacaaggagggcattccccctgaccagcagcgtctcatctttgctggcaagcagctggaggatggccgaaccctcgctgactacaacatccagaaggagtccaccccccaccttgtcctgcgtctgcgtggtggcatgcagatcttcgtgaaaaacctcaccgggcaagaacatcactcctggaggttgagagctctgacaacatcga

SEQ ID NO: 9351 - DNA, 348 bp, Triticum aestivum
  Clone ID: LIB29-002-Q1-E1-E8
ccgactagattgtcaaacaggggcccgtagctccacacacaatgttgccctttgcaacgttcatgggaatcctacagcactatgtccgtaaccgcgctaggccagaacgaagcatctccatgggccatcacagataggatgtcattggagttttgtgttgacttcattcctgaccttaagaagatatagtctccctaaatcgtggtatgaagggagactgactggaaacggcacgcttggtggggactcatcaatatgcacggaccgctattcttgatcgcatccagacaagacagttctacacaactctaacttggcgaccccatatttccattgccacaatatcag

SEQ ID NO: 9352 - DNA, 420 bp, Triticum aestivum
  Clone ID: LIB29-002-Q1-E1-F1
ggtcggaataccgggtcgactccttcaaggaagaggctgatgagggacttcaagcggctgatgcaggaccctcctgcgggcataagcggggcgccgcaggacaacaacataatgctgtggaatgctgtgatttttggccctgacgatagcccctgggacggaggtacgtttaagctgactctccagtttaatgaagaatatcctaataagccaccaacagttcggtttatttctcggatgtttcaccctaacatttatgctgatggaagcatatgcttagatatcctacagaatcagtggagcccaatatatgatgtagctgctatacgtacatctatccaatcgctgctgtgtgatcctaacccgaattcgcctgctaactcagaagctgcccgcatgttcagtgagaacaagcgagag

SEQ ID NO: 9353 - DNA, 191 bp, Triticum aestivum
  Clone ID: LIB29-002-Q1-E1-F6
gatagctcacccactaagctcgaagctttccctgatctggatgatcgccgtcaccatgcttctaattgttcgtcgctgtcatattgatcgggacatgtcatcgaaggggtggcctgcaaatttggttcgagtgagtttgttcacattatcgtcagtgcttgaagttacgcgactgggtgcattcgaccatg

SEQ ID NO: 9354 - DNA, 350 bp, Triticum aestivum
  Clone ID: LIB29-002-Q1-E1-F7
ggtcgccaaagttcgtacagagaggaccattcctgatgtacagcctggatgtattgttcaaatgagagtgcaagttcctgagaacaagcgacgtgagtctacattgaagggcatcgtcatagcacggcgcaatgctgggatcgctacgactttcagattgcgtagattactagctggcgttggcgttgagtctgtctttccactgtactcgccaaatatcaaagaaattaagatcttagacaggtagagagtcaggatagcaaagctgtattacctgatggacagaatgattgcactgatgaaatgagacaccatcagcttggttcttgccattttgtttctgatgtgga

SEQ ID NO: 9355 - DNA, 440 bp, Triticum aestivum
  Clone ID: LIB29-002-Q1-E1-G1
ggcgaaggcgagagaaggggacagcagcgggcgagacagagagaggcgaggagacgacagcaccgccgccatgagcgccctcaagttctgcagcaaatgcgacaacatgctgtacccgcaggaggacaaggagatgcacatcctcctctacgcctgctcgaattgccagcaccaggagattgctactgattcttgtgtgtacaaaagggttcttcggaaatctgctgatgaacctaaagacaccctaaaagacgcagctgctgatgcgtctctgccacgcaccagaagtgttaaatgctacaactgtagctatccagaagctgcttatttccaggccccgacgacaggagaggttggcctgacgctatacttcatctgctgcagccctacctgtggccacaggtgggtggactgactgactgacaagggggaaccctcca

SEQ ID NO: 9356 - DNA, 421 bp, Triticum aestivum
  Clone ID: LIB29-002-Q1-E1-G11
catcgagtagaccctgttattgtgagaattcttaattcaagagttatagggagggacttatgtcaccacaaacagaaactaaagcaggtgttggatttaaagctggtgttaaagattataaattgacttactacaccccagagtatgaaactaaggatactgatatcttggcagcattccgagtaagtcctcagcctggggttccgcccgaagaagcaggggctgcagtagctgccgaatcttctactggtacatggacaactgtttggactgatggacttaccagtcttgatcgttacaaaggacgatgctatcacatcgagcctgttgctggggaagacagccaatggatctgttatgtagcttatccattagacctatttgaagagggttccgttactaacatgtttacttccattgt

SEQ ID NO: 9357 - DNA, 297 bp, Triticum aestivum
  Clone ID: LIB29-002-Q1-E1-G7
ggtggccctgtagagctgaaaagggccgctgaagacaggattactatcagatggactttcaagaaattcaacgaaggcatcatgcgagacatactggacccgctgctggaagatcgcgtggacgaagacgtgttggaagaagcttcagactgtggggttccagtgcgaccctctcacacaggacgaccgtctcacggtaaccgaggtcctggagcagctgtgggacatcaggaaaggcgatcggatgcgcttcaggatcgcatccaatcatttgctcatttaatcacgaccagtgca

SEQ ID NO: 9358 - DNA, 443 bp, Triticum aestivum
  Clone ID: LIB29-002-Q1-E1-G9
gccatcatcgaaaataaagaagaggattacgggatgttcgtctggccatgcagcgtcatcctcgcggaatacgtgtggcagcagaggccgcgcttctcctgctccagagttgtcgagcttggtgcaggaacctcgctgccaggtatagtagctgcaaaagttggagcaggtgttacgctgacagacattgcacataatacagaagtgctggacaacatcaagcaagtatgcggcctcaataatgtgaactgtattaggacttacttggggagattgggatgaacctgttcttgatttgcaccctgatattattctcggagccgatgtgctttatgattcagcaaaatttgatgatctcttcgcaatgggtaccttcctgctgggaaattctcctgtggcagtgttcatcaccacataacagaatcgcagtggtcatcacttga

SEQ ID NO: 9359 - DNA, 365 bp, Triticum aestivum
  Clone ID: LIB29-002-Q1-E1-H11
ccggaaatcgccggtcgacaccttccaacgacaatccatcgactttttcggtgctctgcgtgctcgggtgtacgacgacgaggtgcgcaagtgggtgacctctaccggtatcgagaacattggcaagaagctggtgaactcgcgggacggaccagtgacctttgtgcaaccaaagctgacagtggagaagctgctagagtacgggcacatgctcgtccatgagcaggacaatgtcaagcgtgtgcagcttgctgacacttacatgagccaggcagctctgggtgatgctaaccagtatgcgcataagactggtaccttctacggttagaacattctccatacacaatcaccatctcttgctgcat

SEQ ID NO: 9360 - DNA, 375 bp, Triticum aestivum
  Clone ID: LIB29-002-Q1-E1-H2
cgggtcgaccgccgcggctaacaggtgctacgcaaccgtcgcgccccgtgcccgctcgtccaccatcgtcgccagcctcggcacccccgcgccctccaactcctcctccttccgccccaagctcatcaggaacaccccagtccaggccgcgcccgtcgcacccgcattgatggacgccgccgtggagcgcctcaagaccgggttcgagaagttcaagaccgaggtctacgacaagaagcccgatttcttcgagcccctcaaggccggccaggcgcccaagtacatggtgttcgcgtgcgccgactcgcgtgtgtgcccctcggtcaccctgggcctggagcccggcgaggccttcaccatccgcaacatcgccaa

SEQ ID NO: 9361 - DNA, 325 bp, Triticum aestivum
  Clone ID: LIB29-002-Q1-E1-H4
gacctgatccgctcaaaatgggtgccttgcctcgagttcagcaaggttgggttaaccaccgttcagcacaaggcatcccctgggtactacgatggccggtactggacaatgtggaagctgcctatgttcgggtgcaccgacgccacacaggtgatcaacgacgtggaagaggtcaacaaggagtaccctgacgcgtacgtccgcatcatcggattcgacaacatgcgccacgtgcagtgcgtcagcttcatcgccttcacgccaccgggctgctacgagtccggcaaggccgacacagctcactcatcaccggccacatataaag

SEQ ID NO: 9362 - DNA, 391 bp, Triticum aestivum
  Clone ID: LIB29-002-Q1-E1-H6
ggtcgcctacctgatccgctccaaatgggtgccttgcctcgagttcagcaaggttgggttcatcttccgtgagcacaacgcatcccctgggtactacgatggccggtactggacaatgtggaagctgcctatgttcgggtgcaccgacgccacacaggtgatcaacgaggtggaagaggtcaagaaggagtaccctgacgcgtacgtccgcatcatcggcttcgacaacatgcgccaggtgcactgcgtcagcatcatcgccttcaagccaccgtgctgcgaggagtccggcaacgcctaaacagctcactcaccacggaccacatataaagtgccattgctgttttgtcacctctgacattgcctttgggttttccttctccattttatc

SEQ ID NO: 9363 - DNA, 438 bp, Triticum aestivum
  Clone ID: LIB29-001-Q1-E1-A10
aggtaccagtcaggaattcccgggctcgactccaagataaagctggtgaattgccgaaattagtagaggatcttcgccagacgtcgattagcacagggcctcgaggtgcctttaggatggcgcaagggatccaagctctccttggggttggcggggagtggctaaatgacttctcgaagacagctaacacgtcagaaggaattccagctcagatgcgtcttggtttgctttcccctctttacctcagaaggctttttgaacgcatgggtgcaacttatatcaagctaggtcagttcatagcgtctgcaccaacttcctttcctgcagaatatgttgaagaattccagaactgttttgaccgagcaccacctgttccttatagcgagatcgagtcgatattgcgtgaggagttgcagcggccattggatagtgtctatg

SEQ ID NO: 9364 - DNA, 352 bp, Triticum aestivum
  Clone ID: LIB29-001-Q1-E1-A11
aattcccggctcgacttatcatctaagggttgggattgcctctgtagcctctcggccctcagataaccatgtatggtatatgtggatgatatggccaatggcatggctatcaatggtactagcatgggtttatggatcatctgcgtttgtcgtcgaaagtctcaagctgaagaagatcatgatgcaaacatggctgataccaagatacaacttccagtacagcctgattagggagagggaatccatcaatacgttaattgagcaggcaatatcagatgcggatcaaagaggggtcaaagtgctcagtcttggacttttcagtcaggaaagacgactcaatggaagtggtgaa

SEQ ID NO: 9365 - DNA, 439 bp, Triticum aestivum
  Clone ID: LIB29-001-Q1-E1-A12
ggtaccagtcaggaattcccgggtcgacggtgccggttctcggggtgccatcaggggaccaaagcagggggttctgctccgtccggcgcttcgcaggagatagcgctgccgtcgaggagccggagaatggacttgccgcaggcgatctgcaggtatctgtgcactcgtatgttgtggtacatacagtaggacggccgcttctagacatgtgtgttctacagaattgtctagtagtggtacgtagtaccatgaatatttaggatgctctggttttgaagattacattatattttccgcaaaaaaaaattacattatatctatatatatatgcaacagggaaggtaagcagataacaaccattcaggatgctgcgcctacgatcatgtgatctttctccttgattaaagaaaatttagtggatatcatcgtgattctcact

SEQ ID NO: 9366 - DNA, 378 bp, Triticum aestivum
  Clone ID: LIB29-001-Q1-E1-A2
ggtccggattcacgggtcgacatggcgacggtcagaagagagaacctgaggcgcctcttcatgtacatagataagttgcccacggtgatccccgaatctgttttcgaggtatacgattcccacgtaaagtgaccctgtgctcggctcggcgctgcgccaattgttcatcagttgggtactgctagtgctgtagacattaccaattgttcgtcagtggggtgctgctagtgctgtaggcattgccggttgttcatctgtgtgctgctgctaatgttgtagacatttctggagccccgggcgctggctgcctcgagcttatgaacgctccgagcagttcgccggggaagctctgtatgtatgtgacgtactcctatatat

SEQ ID NO: 9367 - DNA, 410 bp, Triticum aestivum
  Clone ID: LIB29-001-Q1-E1-A6
gggtcgacgcttttttttttttttttttttttttttttttggataattgtttgtcactcatagatgccttgataataattgttttattaccattaacggacacattaatagctagtgcacagaatacagattcctggtaccatcaatgctaatctgcccgcttaaacttgaaaggcaaatagctaattccaacagcatcagaggagaaggggcagctcaaactttaaattgcgaaggcgctaccggcgatgttctttgtcgagggcataccggcagtaacatcttcttcgatgccacattcattcttgccccttatgatcttgaagtacccgtcatcgccccagcctctgttccactgatttgcaagaagccagtaatcctcgccagcatcactaatttcccaaccaatc

SEQ ID NO: 9368 - DNA, 410 bp, Triticum aestivum
  unsure at all n locations
  Clone ID: LIB29-001-Q1-E1-A9
attcccggctcgacgatccgagaaccctcaacaagatcctgtacatgaggccaccggcgaacattgtgtcccacaacgagctcatctcgatgtgggagaggaaagcgggcaggactttccagatcgtgcgcatcccggaggcgggtctcctcaagttgatcaaggaggcggctttccctctgaacatattgctgtccctcgcgctctccatcttcatcgggggcgtacaggccaactttgagattgaagcatcctttggcgtcgaggccaccgagctgtaccccgacctaaagtacaccactatcgacgagtatctcgagcaccttcactgacagcttttggctggctggaatggcaccatccacagtcggcatcaacaatcangatgatgaacaggtggatcctccaaa

SEQ ID NO: 9369 - DNA, 376 bp, Triticum aestivum
  Clone ID: LIB29-001-Q1-E1-B1
gggtcgacgaccactggccatcagatctacaagcttggaggtattgacaagcgtgtgatcgagaggttcgagaacgaagccgccgagatgaacaagaggtctttcaagtacgcctgggtgcttgacaagctgaaggccgagcgtgagaggggtatcaccattgatattgccctgtggaagttcgagaccaccgagtactactgcaccgtcattgatgctcctggtcaccgtgacttcatcaagaacatgattactggtacctcccaggctgactgtgctgtgctcatcattgactccaccactggtggttttgaggctggtatctccaaggatggccagacccgtgagcatgccctccttgctttcactcttggag

SEQ ID NO: 9370 - DNA, 426 bp, Triticum aestivum
  Clone ID: LIB29-001-Q1-E1-B10
aattcccggctcgacttttccactaacaaccccaaaaaacccaactctgccttacgtaaagttgccagagtacgattaacctctggatttgaaatcactgcttatatacctggtattggccataatttacaagaacattctgtactattagtaagaggaggaagggttaaggatttacccggtgtgagatatcgcattattcgaggaaccctagatgctgtcgcagtaaagaatcgtcaacaagggcgttctaaatatggggtcaaaaagccaaaagaataagtgattttagcccttataaaaagaaaacggattcttgaacctctttcacgctcatgtcacgtcgaggtactgcagaacaaagaactgcaaaatccgatccaatttttcgtaatcgattagttaacatggtggttaaccgtatta

SEQ ID NO: 9371 - DNA, 437 bp, Triticum aestivum
  Clone ID: LIB29-001-Q1-E1-B12
gtaccagtcaagaattcccggctcgaccaggctgagaaaatgggacttgactacatggatgttgaaagtctcaagaagatgaacaagaacaagaagcttgttaagaagctagccaagaagtaccatgctttcttggcatcagaggccataatcaagcagatccctcgtctccttggccctggtcttaacaaggcaggcaagtttcccactctggttagtcaccaggaatctcttgaagccaaggtcaacgagacaaaagctacagtcaagttccagctaaagaaggttctttgcatgggtgttgctgtaggcaacttgtcgatggacgagaagcagatccaacaaaacatccaaatgagcgtcaacttccttgtgtccctcctgaagaagaattggcagaatgtgaggtgcctgtacgtgaagagcaccatggggaa

SEQ ID NO: 9372 - DNA, 419 bp, Triticum aestivum
  unsure at all n locations
  Clone ID: LIB29-001-Q1-E1-B2
gtccggagttcacgggtcgacaccttcccaggacaatccatcgactttttcggtgctctgcgtgctcgggtgtacgacgacgaggtgcgcaagtgggtgacctctaccggtatcgagaacattggcaagaggctggtgaactcgcgggacggacccgtgacctttgagcagccaaagatgacagtggagaagctgctagagtacgggcacatgcttgtccaggagcaggacaatgtcaagcgtgtgcagcttgctgacacctacatgagccaggcagctctgggtgatgctaaccaggatgcgatgaagactggttccttctacggttagaacattctccatacacacccaccatctcttgctgcatangangaggtaaacgggcacagcaaggtactttgcctgtaccggcaggatgc

SEQ ID NO: 9373 - DNA, 429 bp, Triticum aestivum
  Clone ID: LIB29-001-Q1-E1-B6
gggtcgactttcgacgtgataaggcggccggaaatcgactcgggagcaatgtagcctgtggctcctcgcacatgagatgtgttctggttggatccacctcggtttagtaactttgccaacccaaagtcagtgatcttaggctcaaagttttggtccaagagtatattctcgggtttcacatcgcaatggatgacccattctaggcactcatggtgaagataggccaaccctttcgcaacacctaatgcaatattgaaccgttgcttccagtccagcaagatgatgcttttatcaccgaacaaaatgctagcaagtgagccgttctcgacatattcacaaaccaacagcctgtgagatccttccgaacaaaacccccatattctcaccagattcatgtggtaaatcctagcaatcacactcagctcggct

SEQ ID NO: 9374 - DNA, 428 bp, Triticum aestivum
  Clone ID: LIB29-001-Q1-E1-B9
gtaccgatcaggaattcccggctcgactcacggttcatttccaaggagaagaaggcattgatgccggtgggctcacaagagagtggtatcagttactatcacgagtgatttttgacaagggtgcccttctattcacgactgttggaaatgacttgacatttcaaccaaaccctaactctgtgtatcagactgaacacctctcatatttcaaatttgttggacgagtggttggaaaagcgctctttgatgcccaacttttggatgtccatttcactagatctttctacaagcacatacttggtgccaaggttacttaccatgatattgaagccattgatcctgcttactacagaaaccttaagtggatgcttgagaatgacataagtgatgtcctggacttcacatttagcatggatgcagatgaagag

SEQ ID NO: 9375 - DNA, 439 bp, Triticum aestivum
  Clone ID: LIB29-001-Q1-E1-C10
gtaccgatcacgaattcccggctcgacaaactaatcaaatctatcaactgttggtacccaggatgcctgcattttgcaaatgtcagtggatcctgaagccagaaacaagcaagagctaacagctcatgttttatcacctcaacatgtataggagaatttggcagcaacaactgatggacagattgatgagacaatacgtcttaaaactatcagaacccgcagtccagtagaggctgcgccggttaacagtgcaagtcaaaaggttaatgaggcaccgaaaccaaatgatgaaatgacgattggagtggtgcaagagcacaggaagggtgtgaagacagagtcttgtcaaggagtaaaacaaggcatgggtgatgtagatgttgtcacggaggaatcatcaccagtgagcacgctaaaattgggaaatgcatgcagcgca

SEQ ID NO: 9376 - DNA, 440 bp, Triticum aestivum
  Clone ID: LIB29-001-Q1-E1-C12
aggtaccgatcaggaattcccgggtcgacttccaccaaagcaaaatccatcatctcatcgaaagacgggacacctttgcctctatcaagtggtatcagatttccaggttgctcggtgagattttacagtttttcgtagtttagatcgagtctgttcttcatacctatagtccacgaaaaagccaagaaaaattagggttagttcatcccatccgaaccaatctgagccttgcataatcttttctgtatttgcttggttgaatttgcggttgcatcgtcgtgttcagttgctggtcttagcgtctagtcttttagagtttcgagttctgttcacaagttgtcacgccgtcgccgcacgatcatcatcgcccctgccatctacgaccaccgctccgaatccgtatccatataccaccaccagtccgtgtccatataccacca

SEQ ID NO: 9377 - DNA, 476 bp, Triticum aestivum
  unsure at all n locations
  Clone ID: LIB29-001-Q1-E1-C2
gtccggaattcacgggtcgacgaggccttcctcgcaaagtatgatgtgaagccgaacaatgccattcttgccgaggacaagcacttgcccatgtacgatgagttgtccagcaaggacaatgttgaatatattgctggaggagccacgcagaactctatcagggttgcccaatggatgcttcaaactcctggtgcaacaagttacatgggttgcattggaaaggacaagtatggtgaggagatgaagagcgccgctaaagctgcaggagttactgctcattactatgaggatgaggctgctcctacaggcacatgtgctgtctgtgttgttggtggcgaaaggtcattgattgcaaacttatctgctgcgaactgctacanatctgagcatctaaagaggccanagaactgggcactagtttgagaaagcgagatacatctacattgctggctttttccttacggtgtcccctgaat

SEQ ID NO: 9378 - DNA, 475 bp, Triticum aestivum
  Clone ID: LIB29-001-Q1-E1-C3
gtccggagttatcgggtcgacgagccctgcaaaataggtagaggtgaaaaagctggacaactgggcactctttgtaggggctgatgtgaggagcccgccgttttcttgcttgagcccagagaagtggggaggaacgagcaaccgcctgtactatgcccattactctcagccttggagcgtacatggctttggtgacgcggcagatgctgtgtgggatccttccaccgaccctgatcttgtgtacaagagaaactggtacggccagcttcaggccttctgggtgtatccaagcatgttctactctgatggccagtgatagtcgatgggcaactatggcttgctgcactaccagcttcttttggaaaaactatctcttccaacagagacttatgcagctgaagaaaagaagtgattttcatggtggcagtcgtactggagcttctgcagttagtttcatccttcagtttttagaaca

SEQ ID NO: 9379 - DNA, 452 bp, Triticum aestivum
  unsure at all n locations
  Clone ID: LIB29-001-Q1-E1-C4
ggtcgacgagcttgtcattctaggcactgtatttctacacaatatgtacccctttgagaggttcatgggagtcctaaagaaatatgtccgtaaccgtgctaggccagaaggaagcatctccatgggccatcaaactgaggatgtcatcgggttttgtgttgacttcattcctggccttaagaagataggtttccctaaatcgcggtatgaggggtgactggctggaaaaggcacgcttggaagggactcaataatatgcagggacggatattcttggtctcaagcacgctacacagttctatagaactctaccttggtgaccccgtatgtcgatgaacacaagaacagtctgcgctccaaacacccggagtagtgcgacgactggattacatgtgaacacatcaggactttcagcagttggttggaaacacgtatcanaggtgacaacactg

SEQ ID NO: 9380 - DNA, 444 bp, Triticum aestivum
  Clone ID: LIB29-001-Q1-E1-C7
gggtcgacgccttcatggctgtaaggcctcttcccaacatgtttggctgagcattgggtgggaagttcataccctttctgtgtggattttattgaattccaggagcaacatatgaagtttcaggatttagttgtaactattaatgtgaacctggcccctcaatcctgtatggcggccactgtttttgcaaaatcagcatgtgatatgtttgttttcaagcttactcgatcactgcaaagatttctatttattggaattagggaacatacacatgttttctggctgaaacacagcctcctcaaatgatcatagcactgtctctacaggcttccatctgtattatggttatgttagtactaccaaactacgaataaaacagatgatctgctggtgaaaaacatggggccgctctacaggattcaagcttacgtacgtttgcatgca

SEQ ID NO: 9381 - DNA, 437 bp, Triticum aestivum
  Clone ID: LIB29-001-Q1-E1-C9
aggtaccgagttaggaattcccggctcgactgatggatcataaaagcgggactgaacttgtgctcacttatgaggataaggatggcgattggatgcttgttggtgatgttccatggcgaatgttcacagacagctgtaggaggatgaggatcatgaaggggtcagatgcagtgggcctcgctccgagggcggccgagaagagcaagaaccagaaatggcaaaaaggatgaacccggtctgtttcctgtgattcgcatcgtcgtacgagggcgatggacttcatgtgtgatgagaaagggatttacttatatataagtacgtgtattctctttattatttccttgtatgttggctcggaacaagcatgttaggttgtgtaagttgatgtgtgtgtgtatctactactactgcactattttactttgattcgcgtgtgt

SEQ ID NO: 9382 - DNA, 447 bp, Triticum aestivum
  Clone ID: LIB29-001-Q1-E1-D1
gtccggaattatcgggtcgacgaccactggccatctgatatacaagcttggaggtattgacaagcgtgtgatcgagaggtttgagaaggaagccgctgagatgaacaagaggtctttcaagtacgcctgggtgcttgacaagctgaaggccgagcgtgagaggggtatcaccattgatattgccctgtggaagttcgagaccaccaagtactactgcaccgtcattgacgcccctggtcaccgtgacttcatcaagaacatgattactggtacctcccaggctgattgtgctgtgctcatcattgactctaccactggtggttttgaggctggtatctccaaggatggccagacccgtgagcacgccctccttgctttcactcttggagtgaagcagatgatctgctgctgcaacaagatggacgccaccactcccaagtactcaaa

SEQ ID NO: 9383 - DNA, 436 bp, Triticum aestivum
  Clone ID: LIB29-001-Q1-E1-D10
ggtaccagtcaggaattcccggctcgacggcaagatttatgatgtgaccgcgtatttggatgaccatcctgggggtgctgatgtgctgcttgccgtgactggtatggatggcaccgaggaatttgaagatgcgggccacagcaaggatgccaaggagttgatgaaagattacgtcattggggagttggacttggacgaaacacctgacatgcctgagatggaggttttcaggaaagagcatgacaaggacttcgccagcaagctggcggcttacgctgtgcagtactgggccattccggtaacagcagttgggatatcagccgtgcttgctatattgtatgctcgaaggaagtgatgatcggttatacgttgattgaaggaccattttggggtaaccaagacatttacagctggttatggatggagagattatgta

SEQ ID NO: 9384 - DNA, 410 bp, Triticum aestivum
  Clone ID: LIB29-001-Q1-E1-D11
aattcccggctcgactacctgatcagctccaagtgggtgccttgcctcgagttcagcaaggttgggttcatcttccgtgagcacaacgcatcccctgggtactacgatggccggtactggacaatgtggaagctgcctatgttcggatgcaccgacgccacgcaggtgatcaacgaggtggacgaggtcaagaaggagtaccctgacgcctatgtccgcatcatcggattcgacaacatgcgtcaggtgcagtgcgtcagcttcatcgccttcaagccaccgggctgcgaggagtccggcaaggcctaaacagctcactcaccacaggccacatataaagtgccattgcagttttgtcaactctgacattgctttgggttttccttctccatttatctttcgtatttgtt

SEQ ID NO: 9385 - DNA, 452 bp, Triticum aestivum
  Clone ID: LIB29-001-Q1-E1-D3
gtccggagttcacgggtcgacaagctcatggagaaagagaagaacgaggtcattgttgctgacaactttttcactgggtcaaaagacaacctgaagaagtggatcggacacccaagatttgaactcatccgtcacgatgtcaccgaaccactgctcgtggaggttgaccaaatctaccaccttgcttgccctgcctcaccaatcttctacaagcacaaccctgtcaagaccatcaagacgaatgtcattggaaccttgaacatgcttggacttgcaaagagagttggagctagaatattgttgacttcgacctctgaagtttatggtgatccccttgagcatcctcagacggaggcgtactggggcaatgttaacccaattggagtcaggagctgctacgatgagggtaagcgtgtagctgagacactgatgttcgactaccacaggcagca

SEQ ID NO: 9386 - DNA, 404 bp, Triticum aestivum
  Clone ID: LIB29-001-Q1-E1-D4
gtccggatttaacgggtcgacgagcaccgggcactatgtgaatgctcctgatatggtcaggtgccagatgaacttcaagcgtctttcgctgaccgacatcaagattgacatcaagcgtatccctaagaaggcaactttgatcaaggccatggaggaagcagatgtgaaaaccaaatgggagaacagctcatggggtaagaagcttgttgtccagaagagaagagcatcgctgaatgactttgacaggttcaaggtcatgttggctaagattaagaggggtggtgcgatcaggcaagagcttgccaagctcaagaaggaggttgctgcttagattatcttagtggatggcatgttgagttttttgttccaagttggatctgctcgatgttccagtgttcttaaag

SEQ ID NO: 9387 - DNA, 438 bp, Triticum aestivum
  Clone ID: LIB29-001-Q1-E1-D9
ggtaccagtcaggaattcccggctcgacgaagtgattgtggctgacgagaagaattgggataacatggtgatcgcgtgcgagtcgccggtgctggtggagttctgggcgccgtggtgcgggccgtgccggatgattgccccggtgatcgacgaactggcaaaggactacgtggggaagatcaagtgctgcaaggtgaacacggacgactgcccaaacatcgcatccacctacggcatccggagcatccccaccgtgctcatgttcaaggacggcgagaagaaggagagcgtcatcggcgccgtcccgaagacaaccctctgcaccataatcgacaagtacatcggcagctaattaatcattcttaattagcgattaatcgaggacgcacacacctttactgttctgttcgcgagacagcatatatgtatgtatatgat

SEQ ID NO: 9388 - DNA, 442 bp, Triticum aestivum
  Clone ID: LIB29-001-Q1-E1-E10
aggtaccagtcacgaattcccggctcgacaccttcacaagacaatccatcgactttttcggtgctctgcgtgctcgggtgtacgacgacgaggtgcgcaagtgggtgacctctaccggtatcgagaacattggcaagaagctggtgaactcgcgggacggaccagtgacctttgagcagccaaagatgacagtggagaagctgctagagtacgggcacatgctcgtccaggagcaggacaatgtcaagcgtgtgcagcttgctgacacctacatgagccaggcagctctgggtgatgctaaccaggatgcgatgaagactggtaccttctacggttagaacattctccatacacacccaccatctcttgctgcataggaggaggtaaaggggcacagcaaggtactttgcctgtaccggcaggatgcaccgaccagactgcg

SEQ ID NO: 9389 - DNA, 420 bp, Triticum aestivum
  Clone ID: LIB29-001-Q1-E1-E11
aattcccggctcgacgcgtacagcatcacctggaatcctaggaaatctcccggtagatatgtttcagcactaagcttcactggttgcgacttcgacatgtacgtgctagagcatggcacgaacaagacggtgggtcagtgcactgctacatgccctgtcaaagatatcacggatacggtggcttggcagtattgcaacggtacaggatgttgcttcaccaacgtcgatgccgagtttgctacaggcatcgagataaagtttgtccgccacaagattggacagctgaagttccaagcgaacagcaaccgaagctctatatggcatacagttgatgtaaccgctgattccattattatgtggggtatcatcgttaatgaacatggccccttgcaaaacagcacagattatgcatgtctcagc

SEQ ID NO: 9390 - DNA, 441 bp, Triticum aestivum
  Clone ID: LIB29-001-Q1-E1-E12
aggtacctagtcaggaattcccggctcgacctaggggggacatcatggacggttctacttgggaggagggacgccaccaccgcaagtgcgtccttggccaacagtgacctccccggccccaactccaaccttaatgatctcctcgccgctttctccaagaagggattaagcagcaccgacatggttgctctctcaggggggcacaccatcggccgggcgcaatgccagaattaccgaaaccggatctacgccgacaccgacatcgacgggaccttcacggcgtcgctgcgaggcgactgcccacagggtggtggcaacgacggcaacctcgcgcctctcgacgcgtcctcgcccgactacttcgacaacagctacttctccggcctcctcagccatcgggggctgctccactccgaccaggcgctgtacgacggcggctcc

SEQ ID NO: 9391 - DNA, 482 bp, Triticum aestivum
  Clone ID: LIB29-001-Q1-E1-E2
gtccggatttagcgggtcgacgacctgatccgctccaagagggtgccctgcctcgagttcagcaaggttggcttcgtcttccgtgagcacaacagctcccccgggtactacgacggtcgatactggacaatgtggaagctgcctatgttcgggtgcaccgacgccacacaggtgctcaacgaggtggaggaggtcaagaaggagtaccctgacgcctatgtccgcgtcatcggcttcgacaacctgcgccaggtgcagtgcgtcagcttcatcgccttcaggccaccgggttgcgaggagtccggcaaggcctaaactatgagttgaaacaatggcctatctcatatgaagatcttttgtgaatttcacttttgtccacgacctctgtttgcacgactctgctttccgaccggagcataccttttgttctaaatgattttgtgtatgtacgtaagaacctatgtttctcaacatgcatacat

SEQ ID NO: 9392 - DNA, 464 bp, Triticum aestivum
  Clone ID: LIB29-001-Q1-E1-E3
ggtccggattcacgggtcgaccgttcattcttagaaaattgattattgaatcaccattccaatgttggccatgcaacccagcccatatttcgggtgcacctttcaaccattgttaaattgtgtatgttttcctcgagcatacatcaatatatcattttgatctgacaaatgttatatccttgttcacataattgtggaaatccatcctttggaaatcttgatgaattgtcgctgagttcatcagccacctccttgtcctctccttgggttaatgatgaactcttgttaacagaaatcacttcatagttcatttcccgagaatcttacagtgtcatcccgtcaaattgtgtcgcaccttttcttttcaagcatcctgagtctgaggtatcctaacaccgatcagatctgaatctcggtcagatatgatggttggaacacttttcaagagtcacaacattggtctg

SEQ ID NO: 9393 - DNA, 454 bp, Triticum aestivum
  Clone ID: LIB29-001-Q1-E1-E4
gtccggagttcgcgggtcgacgacctgatccgctccaaaagggtgccttgcctcgagttcagcaaggttgggttcatcttccgtgagcacaacgcatcccctgggtactacgatggccggtactggacaatgtggaagctgcctatgttcgggtgcactgacgccacacaggtgatcaacgaggtggaagaggtcaagaaggagtaccctgacgcgtatgtccgcatcatcggattcgacaacatgcgtcaggtgcagtgcgtcaacttcatcgccttcaagccaccgggctgcgaggagtccggcaaggcctaaacagctcactcaccacaggccacatataaagtgccattgcagttttgtcaactctgacattgctttgggttttccttctccatttatcgttcctatttgttcctaaagatatgtgtatgtccatgttcatgttccaaca

SEQ ID NO: 9394 - DNA, 467 bp, Triticum aestivum
  unsure at all n locations
  Clone ID: LIB29-001-Q1-E1-E5
accggtcaggacttcccgggtcgactacctgatccgctcaaagtgggtgccctgcctcgagttcagcaaggttggcttcgtctttcgtgagcacaacagctcccccgggtactacgacggccgatactggacaatgtggaagctgcctatgttcgggtgcaccgacgccacgcaggtgctcaacgaggtggaggaggtcaagaaggagtaccctgacgcctatgtccgcgtcatcggcttcgacaacctgcgccaggtgcagtgcgtcagcttcatcgcattcaggccaccgggttgcgaggagtctggcaaggcctaaactacgagttgaagcaatggcctatgtatgattgtcttttgtgaacttcacttttgtccaggactctgctttccgaccagagcatatttttcgttcggtatgatctgtgtntgtacgaacataggttgtggagcatgcatatggtaat

SEQ ID NO: 9395 - DNA, 441 bp, Triticum aestivum
  unsure at all n locations
  Clone ID: LIB29-001-Q1-E1-E6
taccggtacggatgttccgggtcgacttttccactatcaaacccaaaaaacccaactctgccttacgtaaagttgccaaagtacgattaacctctggatttgaaatcactgcttatatacctggtattggccataatttacaagaacattctgtagtactagtaacaggaggaagggttaaggatttacccggtgtgatatatcgcattattcgaggaaccctagatgctgtcgcagtaaacaatcgtcaacaacggcgttctactgcgttgtagattcttatccaagacttgtatcatttgatgatgccatgtgaatcgctagaaacatgtgaagtgtatggctaacccaataacgaaagtttcgtaatgggactggagcangctaccatgagacacaagatcctctttctaaagagattcgattcggaactcttatatg

SEQ ID NO: 9396 - DNA, 437 bp, Triticum aestivum
  Clone ID: LIB29-001-Q1-E1-E9
ggtacctatcaggaattcgcggctcgaccgagaagacaacagaagggcatcgagtagaccctgttattgtgagaattcttaattcaagagttatagggagggacttatgtcaccacaaacagaaactaaagcaggtgttggatttaaagctggtgttaaagattataaattgacttactacaccccagagtatgaaactaaggatactgatatcttggcagcattccgagtaagtcctcagcctggggttccgcccgaagaagcaggggctgcagtagctgccgaatcttctactggtacatggacaactgtttggactgatggacttaccagtcttgatcgttacaaaggacgatgctatcacatcgagcctgttgctggggaagacagccaatggatctgttatgtagcttatccattagacctatttgaagagg

SEQ ID NO: 9397 - DNA, 430 bp, Triticum aestivum
  Clone ID: LIB29-001-Q1-E1-F10
aattcccggctcgactttttcggtactcctgccttgctccggttgttcacaacaagggcccaagttagtgacctccaacggtatccagaacattggcaagaagctggtgaactccccggacggaccccttacctttgggcaaccaaagatgacaattgagaagctgccagagtacaggcacatgcttgtgcaagaacacggcaatgtcaaacccttttcaaccttctgacaccctacatgaaccaggcaactctgggtgatgccaaacaggatgcgatgaaaaacgggtcccttcaaggttagaacattctccatacacaaccaccatctcctgctgcataagatgaggtaaaagggcacaacaaggtactttgcctgtaccggcaagatgcaacgaccaaaatgccaagaaattctatccaaacagcgg

SEQ ID NO: 9398 - DNA, 367 bp, Triticum aestivum
  Clone ID: LIB29-001-Q1-E1-F2
ggtccggatttagcgggtcgacgagctcaccgccgacaaccgggtctaccacaaggcctgcttcaggtgccaccactgcaagggcaccctcaagctcgcaaattacaactcgttcgaaggagtgctctactgcaggcctcactttgaccagctcttcaagaggaccgggagcctggacaagagcttcgaaggcactccaaaggttgtcaagccagaaaggaatgttgggaatgagaatgctactaaagtctccagcgcatttgctggcactagagagaaatgttttggatgcagcatgacagtctatccaattgagagggttactgtgaataacactatgtaccacaggagctgcttcaaatgctgc

SEQ ID NO: 9399 - DNA, 371 bp, Triticum aestivum
  Clone ID: LIB29-001-Q1-E1-F4
acggtccggaattcacgggtcgacaccctcccaggacaatccatcgactttttcggtgctctgcgtgctcgggtgtacgacgacgaggtgcgcaagtgggtgacctctaccggtatcgagaacattggaaagaaccttgtgaactcgcgggacggaccactgacctttgagcagccaaagatgacagtcgagaagcggctacagtacgggcacatgctcgtccagcagcaggacaatgtccagcgtgtgcagcctgctgacacctacatgagccaagcatctctgggtgatgcgaaccatgatgcgatgaacactggttcctgctacggttagaacattctccatacagacccagcatctcgtgctgcata

SEQ ID NO: 9400 - DNA, 421 bp, Triticum aestivum
  Clone ID: LIB29-001-Q1-E1-F5
gggtcgacttttccactaacaaacccaaaaaacccaactctgccttacgtaaagttgccagagtacgattaacctctggatttgaaatcactgcttatatacctggtattggccataatttacaagaacattctgtagtattagtaagaggaggaagggttaaggatttacccggtgtgagatatcgcattattcgaggaaccctagatgctgtcgcagtaaagaatcgtcaacaagggcgttctaaatatggggtcaaaaagccaaaaaaataagtgattttagcccttataaaaagaaaacggattcttgaacctctttcacgctcatgtcacgtcgaggtactgcagaaaaaagaactgcaaaatccgatcaattttttcgtaatcaattagttaacatggtgggttaacgtattatg

SEQ ID NO: 9401 - DNA, 146 bp, Triticum aestivum
  Clone ID: LIB29-001-Q1-E1-F7
cccgggtcgacaatagcgggaaaatagttgggatcaaatgcaaagatggaattgtccttggtgtggacaagctgataacctcacagatgagacttgccgggtccaaccggagacttcattccgtgcaccggaactcggcttggctg

SEQ ID NO: 9402 - DNA, 436 bp, Triticum aestivum
  Clone ID: LIB29-001-Q1-E1-F9
taccgatcacgaattcccggctcgactacctgatcagctccaagtgggtgccttgcctcgagttcagcaaggttgggttcatcttccgtgagcacaacgcatctcctgggtactacgatggccggtattggacaatgtggaagctgcctatgttcgggtgcactgacgccacacaggtgatcaacgaggtggaggaggtcaagaaggagtaccctgacgcgtatgtccgcatcatcggattcgacaacatgcgtcaggtgcagtgcgtcagcttcatcgccttcaagccaccgggctgcgatgagtccggcaaggcctaaacagctcactcacgacaggccatatataaagtgccattgcagttttgtcaactctgacattgctttgggttttccttctccatttatctttcttatttgttcctaagaatatgtgt

SEQ ID NO: 9403 - DNA, 437 bp, Triticum aestivum
  Clone ID: LIB29-001-Q1-E1-G11
aggtaccagtcaggaattcccggctcgacaccttcccaagacaatccatcgactttttcggtgctctgcgtgctcgggtgtacgacgacgaggtgcgcaagtgggtgacctctaccggtatcgagaacattggcaagaagctggtgaactcgcgggacggaccagtgacctttgagcagccaaagatgacagtggagaagctgctagagtacgggcacatgctcgtccaggagcatgacaatgtcaagcgtgtgcagcttgctgacacctacatgagccaggcagctctgggtgatgctaaccaggatgcgatgaagactggtaccttctacggttagaacattctccatacacacccgccatctcttgctgcataggacgaggtaaaggggcacagcaatgtactttgcctgtaccggcaggatgcaccgaccaga

SEQ ID NO: 9404 - DNA, 441 bp, Triticum aestivum
  Clone ID: LIB29-001-Q1-E1-G12
ggtaccagtcaggaattcccggctcgacagataaagcatgagctcgctaacatctcagtcaaggtgaattggtccacaaattcagctttctaggctcatggcaatgttgattagtcacgttccatgcgaagatctatggttgctgttaacgtgggaaactttgatgctattgaagttctttcttttttgttggtagcttaccaagctggtcgcttggtgctgttgaagcgttaacgccccttgctaaagctatatggtcgtgctagtctgacagacaacatggagctagcttctgtcatggggaaagtgaaatgaaaagaagccaggtaaactacagtctggagctcgcttctatcctggggaagatgaccagttggtgatacttattttggaacggagggagtaatgtagcactggacggatgtgccctttattacatac

SEQ ID NO: 9405 - DNA, 465 bp, Triticum aestivum
  Clone ID: LIB29-001-Q1-E1-G3
accggtccggatttcacgggtcgacaaacatacgttaccaaggtcgagagggggaaccgacttagcagtctcatctatccatttcatattgccttgcacaatgatccccttgagtatgttcgcaaggcaaaaaggtctatgcataggaaaaagagctctttagaagtgaagtttatacaagtggttgttcaatttttggtgaaatactttggcgcaaagacaggagcttttatcttccgcctatttgccacacgtacaagcacactcttatcaaatgttgttgggccatctgaacatataacgctatgtgggcacccaatttccttcatggcaatcaccgcctacgggcaaccacaggcactgatcatgcacttcctaaattacggtagcactatccgggtaactctggcagttgatgacgaacaattcccagattgtcataagcttttagatgattttgctgac

SEQ ID NO: 9406 - DNA, 441 bp, Triticum aestivum
  unsure at all n locations
  Clone ID: LIB29-001-Q1-E1-G4
cggtccggagttcacgggtcgacggaggcgcggcaccagccactgaagccggggcgtctcagccggctccaggcgaggacttggaagccgctctgccaggcccgccgccaggaactccacctccgtctgcgatcacccagcaggagactccagcttctccggctgcggctccagaagatgatctgcctctgcctcctcaccctccactgacccagcatgaggaggatggaacgccagaagatgatctgcctctgcctcctcctcttccactgccccagcaggaggctggagcgccaggttcagcgccagaggcaggatccgtcgatgacaagtgggcaggacgtggcgatgacaagtgggcgggacgcccggatgacaagtgggtctagtggttgcttanggcgtggaactgaactgaactgaactggttgtacatagatg

SEQ ID NO: 9407 - DNA, 443 bp, Triticum aestivum
  Clone ID: LIB29-001-Q1-E1-G6
ccggccgtacggtacggaattcccgggtcgacaccttcccaggacaatccatcgactttttcggtgctctgcgtgctcgggtgtacgacgacgaggtgcgcaagtgggtgacctctaccggtatcgagaacattggcaagaagcttgtgaactcgcgggacggaccagtgacctttgagcagccaaagatgacagtcgagaagctgctagagtacgggcacatgctcgtccaggagcaggacaatgtcaagcgtgtgcagcttgctgacacctacatgagccaggcagctctgggtgatgctaaccaggatgcgatgaagactggttccttctacggttagaacattctccatacacacccaccatctcttgctgcatacgaggaggtaaaggggcacagcaaggtactttgcctgtgccggcaggatgcaccgaccagactg

SEQ ID NO: 9408 - DNA, 406 bp, Triticum aestivum
  Clone ID: LIB29-001-Q1-E1-H10
ggtaccagtcaggaattcccggctcgacgaggccttcatcgctaagtatgatgtcaagccgaacaatgccattctcgccgaggacaagcacttgcccatgtacgatgagttgtccagcaaggaaaatgttgaatacattgctggaggagccacgcagaactctatcagggttgcccaatggatgcttcaaactcctggtgcaacaagttacatgggttgcattggaaaggacaagtatggtgaggagatgaagagcgccgctaaagctgcaggagttactgctcattactatgaggatgaggctgctcctacaggcacatgtgctgtatgtgttgttggtggcgaaaggtcattgattgcaaacttatctgctgcgaactgctacaaatctgagcatctaaagaag

SEQ ID NO: 9409 - DNA, 439 bp, Triticum aestivum
  Clone ID: LIB29-001-Q1-E1-H12
taccagtcaggaattcccggctcgacgtactccttactggctgggagatggtcatggggacgattgtatggcgtccagataggctctcccacaaagagccgcattgccttgatgtagttgtcactatccaatgtaaagcggtgatacattcctgcaggcaaaacaatcatgccacctttcttaactgctatacggatccactgttcgttttggtccctcacatcaaagtatccactgccctcgagacaatagcgtatctcttcatcagtatgcaagtgctcttcaaagaagttcttcagcttggccccatagtttggcaacttctctggacatacgtcgcaaatgtccacataagagtatcccctggcctcacggattttcttgagattctcgtctttctcccagtcatcagcattcaaggttcagcttacaacaccca

SEQ ID NO: 9410 - DNA, 421 bp, Triticum aestivum
  unsure at all n locations
  Clone ID: LIB29-001-Q1-E1-H3
gtccggaantaacgggtggacggcctgatccgctccaagtgggtgccctgcctcgagttcagcaaggttggcttcgtctttcgtgagcacaacagctcccccgggtactacgacggccgatactggacaatgtggaagctgcctatgttcgggtgcaccgacgccacgcaggtgctcaacgacgtggaggaggtcaagaaggagtaccctgacgcctatgtccgcgtcatcggcttcgacaacctgcgccaggtgcagtgcgtcggcttcatcgcattcatgccaccgggttgcgaggagtctggcaatgcctaaactacgagttgaagcaatggcctatgtatgattgtcttttgtgaacttcacttttgtccaggactctgctttccgaccagagcatatttttcgttcggtatgatct

SEQ ID NO: 9411 - DNA, 472 bp, Triticum aestivum
  Clone ID: LIB29-001-Q1-E1-H4
cggtccggatttcacgggtcgactacttgatccgctcaaagtgggtgccctgcctcgagttcagcaaggttggcttcgttttccgtgagcacaacagctcccccgggtactacgatggtcgatactggacaatgtggaagctgcctatgttcgggtgcaccgacgctacacaggtgctcaacgaggtggaggaggtcaagaaggagtaccctgacgcctatgtccgcgtcatcggcttcgacaacctacgccaggtgcagtgcgtcagcttcattgccttcaggccaccgggttgcgaggagtctggcaaggcctaaactacgagttgaaacaatggcctatgtatgaaggtcttttgtgaacttcacttttgtccacgactctgctggacgaccagagcatatttttcattctatatggtctgtgtatgtatgtacgaacatagattctcgagcatgcatatgtaaattct

SEQ ID NO: 9412 - DNA, 395 bp, Triticum aestivum
  Clone ID: LIB29-001-Q1-E1-H8
tcccgggtcgaccgcgccgccgtcccctggtatgcggagtttaggaatactgggttggagagatccgagccactgaagaaagatctggaatggttcacggaacagggtcacaccattccagaaccaactgctgctggtactgcatatgcttcctatctggaagagttgtctgagaaggatccccaagcatttatctgccacttctataatgtgtactttgctcatactgctggaggccgaatgattggcaaaaaggttgccgagaagattctggacaagaaagagctggagttctacaagtgggaaggtaccctgtcccagctgctgcagaatgtccgcatcacactaaaccaagttgcttctagctggtctcgggaagagaaggaccactgcct

SEQ ID NO: 9413 - DNA, 438 bp, Triticum aestivum
  Clone ID: LIB29-001-Q1-E1-H9
aggtaccgatcaggaattcccgggtcgactacctgatcagctccaagtgggtgccttgcctcgagttcagcaaggttgggttcatcttccgtgagcacaacgtatctcctgggtactacgatggccggtattggacaatgtggaagctgcctatgttcgggtgcactgacgccacacaggtgatcaacgaggtggaggaggtcaagaaggagtaccctgacgcgtatgtccgcatcatcggattcgacaacatgcgtcaggtgcagtgcgtcagcttcatcgccttcaagccaccgggctgcgaggagtccggcaaggcctaaacagctcactcacgacaggccatatataaagtgccattgcagttttgtcaactctgacattgctttgggttttccttctccatttatctttcttatttgttcctaagaatatgtg

SEQ ID NO: 9414 - DNA, 454 bp, Triticum aestivum
  Clone ID: LIB29-002-Q1-E1-A10
ccggacttcccgggtcgcctacctgatccgctcaaagtgggtgccttgcctcgagttcagcaaggttgggttcatcttccgtgagcacaacgcatctcctgggtactacgatggccggtattggacaatgtggaagctgcctatgttcgggtgcactgacgccacacaggtgatcaacgaggtggaggaggtcaagaaggagtaccctgacgcgtatgtccgcatcatcggattcgacaacatgcgtcaggtacagtgcgtcagcttcatcgccttcaagccaccgggctgcgaggagtccggcaaggcctaaacagctcactcacgacaggccatatataaagtgccattgcagttttgtcaactctgacattgctttgggttttccttctccatttatctttcttatttgttcctaagaatatctgtatgtccatgttcatgtaccaacatg

SEQ ID NO: 9415 - DNA, 478 bp, Triticum aestivum
  Clone ID: LIB29-002-Q1-E1-A2
ggtccggacttaccgggtcgacaccttcccaggacaatccatcgactttttcggtgctctgcgtgctcgggtgtacgacgacgaggtgcgcaagtgggtgacctctaccggtatcgagaacattggcaagaggctggtgaactcgcgggacggacccgtgacctttgagcagccaaagatgacagtggagaagctgctagagtacgggcacatgcttgtccaggagcaggacaatgtcaagcgtgtgcagcttgctgacacctacatgagccaggcagctctgggtgatgctaaccaggatgcgatgaagactggttccttctacggttagaacattctccatacacacccaccatctcttgctgcataggaggaggtaaaagggcacagcaaggtactttgcctgtaccggcaggatgcaccgaccagactgccaagaacttcgacccaacggcgaggagtgacgacgggagctgcc

SEQ ID NO: 9416 - DNA, 418 bp, Triticum aestivum
  Clone ID: LIB29-002-Q1-E1-A7
gggccgacatgccgcggaatcagagcagtgtgcggggtgtccgggaggagagctgtttcagggctggctcttcttggcgccgctgcctcttgcgcgaatctcctcgccgtgcccatgccggtgcaggcagcaatgctggagcccgatgtcatcaggtacagaaagctggacagtggagtaaagcttgaagatgtagtcgatggcgaagggccggaggctcgggaaggcgatttagtgcaattcaactacgtgtgccgccgtgcaaatggttatttcgtgcatagcacggtgaatcagttcagcggcgagagtaagccggtgacacttcgactcgacgtgcaagagatgattcggggcctcaaagacgtcatagtcggcatgaaagccggaggcaagaggagggctctgataccccctg

SEQ ID NO: 9417 - DNA, 469 bp, Triticum aestivum
  Clone ID: LIB29-002-Q1-E1-A8
gggtggactgggactacatcaaggagaatgaggatcactatccaggtgtacatgatagtttcaaggcttgtggagtcgatgagtttgtggctcagaagctcacaaaatggaatgatgagctcatcatgcagttctactccacaactcatttctacctagatggaaggattgtctggatgtctgaaggtacgaggtaccagtccacggttgctgaatgggcgaagttgatcaatgccccaaaagagagtgaagatgacttggatgtctatgccaaccggaagaaggatcacaacacaatggcacacatgtacaaggagatcccacatgctgctcttgagacacataagtttggatctgtacattaccttctgtcaggcttgccaaccatcaactggatcctcaggcacactctctttcccaagtcaggtgatcacaagatgatcagaggccatgcaattaacttgcttca

SEQ ID NO: 9418 - DNA, 460 bp, Triticum aestivum
  Clone ID: LIB29-002-Q1-E1-A9
tcccgggtcgacacggctaataacgtacactgcatgcaaggataccttccgtgggcgtgtttgtgagtgccctattgtcaaaggtgtaaaattcgtgggggatggatataccaactgtgaagcttccggtgttggtaggtgtgagatcaacaatggaggatgctggaaagaaactaagaatgggaagacaatatctgcctgctcgcatgaagaatctgaaggttgcaaatgtccacaaggtttcaagggcgatggtgtaaaaagctgtgaagatattgatgaatgcaaagcgaaatctgcctgtcagtgcaatggctgcagttgcgagaatacatggggaagctatgaatgcagctgtggtggtaacaacatgttatacatgagagagcaagacacgtgcatcagcaaacaagctgcctcctcagtcggctggagcttcatgtgggttattttcttcgga

SEQ ID NO: 9419 - DNA, 342 bp, Triticum aestivum
  Clone ID: LIB29-002-Q1-E1-B11
tcggcgaaaccacctacgtcttcacattgaacgacgacgtcaacattgtgccgtcggtggtgtaactcaagccgcccaaaccgaaacaaggcatcccgctcgtgctccactgcgtctaagagccgcacacccccctctttacaccaaagctcgggaaactctcccaaaaaggggtgcgttcgtcacaggtacctccaaacattacagaattattacaagtgggatttggagttgctgttgttgttgtaatcctcaacctgttgtgtgttgtaattggtgtaatccacaccaagttttgcctccaacaaacaaataaatcactgaagggttcctccttccttg

SEQ ID NO: 9420 - DNA, 459 bp, Triticum aestivum
  Clone ID: LIB29-002-Q1-E1-B12
ccggaattcccgggtcgccaaacatacgttaccaaggtcgagagggggaaccgacttagcagtctcatctatccatttcatattgccttgcacaatgatccccttgagtatgttcgcaaggcaaaaaggtctatgcataggaaaaagagctctttagaagtgaagtttatacaagtggttgttcaatttttggtgaaatactttggcgcaaagacaggagcttttatcttccgcctatttgccacacgtacaagcacactcttatcaaatgttgttgggccatctgaacatataacgctatgtgggcacccaatttccttcatggcaatcaccgcctacgggcaaccacaggcactgatcatgcacttcctagattacggtagcactatccgggtaactctggcagttgatgacaaacagttcccagattgtcataagcttttagatgattttgctgac

SEQ ID NO: 9421 - DNA, 439 bp, Triticum aestivum
  unsure at all n locations
  Clone ID: LIB29-002-Q1-E1-B2
ggtccggaattaccgggtcgactcctcacttggtcaacaagctcaggggcggcacgatgatcaaggtcaagactctcactgggaaggagatcgaaatcgacattgagcccaccgacacgattgacaggatcaaggagcgcgttgaggagaaagaaggcattcctcctgtgcagcaaaggctgatttacgctggtaagcagcttgcagatgacaagactgccaaggactacaacatcgaaggtggctcggtcctccatcttgtccttgctctgangggtggttactagttaagctgtaatgggaacacttgcctcctgagagaagtgaccattggtggcatggaacctgtgttggtgttgcaaagagataataacaaactagctttgcttagtgggaggggctgtcttccatgttatctgcctatatgatttgacaaaac

SEQ ID NO: 9422 - DNA, 481 bp, Triticum aestivum
  Clone ID: LIB29-002-Q1-E1-B8
taccggtcaggtacttcccgggtggactgatcttacttgcaatcgtttctccaaagtgtttcttcacaagatgtctctcatcaactcctttagttttatcatgaatactcgatcaacaatatctggccggtcggctggatttaagcctcctcctgcttcatctagcatgtattggatctcgggccactttgcattgcatgtgaatgttataaacaggtctggatatccagcccaacggcatattgcaaaagcgtcttgcaagttctgtgccttgtatcttctgcctcctgtaaaagatgaaggtacaattatcctctttccaacctgctctgttctggtgtcacctcgctcaatcgcgtcttgcagtccactataaagttcagttcgtaacttcccttgattattcctgatctagtttagtctgttttgctcaatgcatgtgtaaacatcttaccaaaattgcagcgatagatgtctagac

SEQ ID NO: 9423 - DNA, 423 bp, Triticum aestivum
  Clone ID: LIB29-002-Q1-E1-B9
acagtccggacttcccgggtcgactaggaaggattcaaaatcagcatggaaggttcttatcatggataagtttatggtcaagataatgtcctactcatgtaagatggcagacatcacagaagaaggggtttcattggttgaagatctatacaaacggagacagccgttgccttcactggatgctatatatttcatccaaccaactaaagaaaacgttgttatgttcctctctgacatgtcaggaagaagcccgttatacaagaaggcgtatgtgtttttcagttctcccatacagaaagacttagttgctcaaataaaaagggattcaagtatattacctcgtattggtgcacttagtgagatgaatttggagtacttccctattgattcccagggtttcataactgacccatgaaagggcaa

SEQ ID NO: 9424 - DNA, 437 bp, Triticum aestivum
  unsure at all n locations
  Clone ID: LIB29-002-Q1-E1-C11
ccggaattcgcgggtcgacaagtcagttaaagtacccaccgttgagccagtttatgtcaatgaagagtacatcccgtttcctcccttccgcatccgcaacatcagggatgcaaagaaggcagcggctgatgccaggagtggctcctacggcaatgccaccatctctcatggatcgtacagcgaggagggtcatctgtagttctattaggcgacttggcttaagggttggtatgaactatgatcggcgaattttgtcagattggctggagttttgcacccttgtggggtagtgttaggatcgaccggtgaatttggtctgttcttcagaccgacccttgcgcggcagctttgaattgctgaggccagtttgaattatgctaaaccttcatggatgatgttatgggcgttcaggcttactttcanggttgttttctgat

SEQ ID NO: 9425 - DNA, 445 bp, Triticum aestivum
  Clone ID: LIB29-002-Q1-E1-C12
gggtcgccactttcaaatggatatttgatgagtttgtgaagatgatgggagggaaaagaccaattaccattttaacagaccaagcgagggcgatggaagtcgctattgaggacgtatatccggatgcaacacagagatggtgcaagtggcacatcctgaagaaggccaaagagagcctggggtctaattacaccaagaaatctgatttcagggcagaattccacaaattggttcacgaaatgctgactatagaggagtttgaggacaggtgggcagcgttgcttgagaagtattcactgactaagaacacgcacctgacgcaaatttacgagacaaggcagaaatgggccaagccatactttgcaggaaaattctgcgcaaggcaaaacagcactgggaggagtgagagcgccaatcacatgttgagacagtatgtgccaacttc

SEQ ID NO: 9426 - DNA, 362 bp, Triticum aestivum
  Clone ID: LIB29-002-Q1-E1-C3
ggtccggattaccgggtcgacaagctcaccgccgacaaacgggtctaccacaaggcctgcttcaggtgccaccactgcaagggcaccctcaagctcgcaaattacaactcgttcgaaggagtgctctactgcaggcctcactttgaccagctcttcaagaggaccgggagcctggacaagagcttcgaaggcactccaaaggttgtcaagccagaaaggaatgttgggaatgagaatgctactaaagtctccagcgcatttgctggcactagagagaaatgttttggatgcagcaagacagtctatccaattgagaaggttactgtgaataacactatgtaccacaagagctgcttcaaatg

SEQ ID NO: 9427 - DNA, 436 bp, Triticum aestivum
  unsure at all n locations
  Clone ID: LIB29-002-Q1-E1-C7
gtaccggtcaggatattcncgggtcgacgctccatttggtcctgaggcttaggggtggaactatgatcaaggtgaagacacttactgggaaggaaattgagattgatattgagcccactgacacaatcgacagaatcaaggaacgtgttgaggagaaagagggtattccacctgttcaacagaggctcatctatgctgggaagcaactcgctgatgacaaaactgctaaggactacaacatcgaaggtggttcagtgctccatcttgtgcttgctctgaagggcggtcagtagatgcaacctcgacgtggaccgtaaaggccatttctaccagaacttgtttgcagacctagatctgtgaattttgcggttgattgaagtgccatgtaattgacgcatttgtgaagtcagctgtcacctgtacttggatggaattg

SEQ ID NO: 9428 - DNA, 419 bp, Triticum aestivum
  Clone ID: LIB29-002-Q1-E1-D1
ggtccggaataccgggtcgactctggcaagtcgaccaccactggccatctgatctacaagcttggaggtattgacaagcgtgtgatcgagaggtttgagaaggaagccgctgagatgaacaagaggtctttcaagtacgcctgggtgcttgacaagctgaaggccgagcgtgagaggggtatcaccattgatattgccctgtggaagttcgagaccaccaagtactactgcaccgtcattgacgcccctggtcaccgtgacttcatcaagaacatgattactggtacctcccaggctgattgtgctgtgctcatcattgactctaccactggtggttttgagactggtatctccaaggatggccagacgcgtgagcacgccctccttgctttcactcttggagtgaagcagatgatcta

SEQ ID NO: 9429 - DNA, 354 bp, Triticum aestivum
  Clone ID: LIB29-002-Q1-E1-D10
gggtggccaccttcccaggacaatccatcgactttttcggtgctctgcgtgctcgggtgtacgacgacgaggtgcgcaagtgggtgacctctaccggtatcgagaacattggcaagaagcttgtgaactcgcgggacggaccagtgacctttgagcagccaaagatgacagtcgagaagctgctagagtacgggcacatgctcgtccaggagcaggacaatgtcaagcgtgtgcagcttgctgacacctacatgagccaggcagctctgggtgatgctaaccaggatgcgatgaagactggttccttctacggttagaacattctccatacacacgcagcatctcttgctgcat

SEQ ID NO: 9430 - DNA, 474 bp, Triticum aestivum
  Clone ID: LIB29-002-Q1-E1-D11
tggccgtaccagtccggaattcgcgggtcgaccagtctaacgtggccatcagggagcagtttgggaagtttgacagtgtgcttgagccaggatgccactgcctgccttggatctttgggaaacgtgtagttggccatctcacactcaggttgcagcagctggatgtgcgctgtgaaactaagacaaaggacaatgtgttcgtcactgttgttgcatcgattcagtaccgacctctggctggcaaagaaagtgacgcatactacaaactgaccaacacaagatcccagattcaagcctatgtctttgatgtgatcagggcaagtgttccaaagctcaacctggatgatgctttcgtgcagaagaacgatatagcaaaggctgtggaggatgaacttgaaaaagctatgtcggcatatggctttgagatcgtgcagaccctcattgtcgacatcgaaccagatgcgcatgtcaagc

SEQ ID NO: 9431 - DNA, 342 bp, Triticum aestivum
  Clone ID: LIB29-002-Q1-E1-D12
gtggactatcgcaacacccaatatcatggggtcatcggcctcggcacgccgctgcaaaatttcacggtgagattcgagaccgggagctccaatttgtaggttcccactgcgaaatgctatttcactagggcatggtagttccatgccaaatagaaatcgagcacgtcaggcatgtaatagcatatggtgagatttgcgatacatatggggatctagaacttacactggacttttcagcattgagaaagtattggttggagacacagatgtcgtaaacattgggacattgatcacaacagtgaatatatgtccatttgcactctcgtgagtatgatgacacca

SEQ ID NO: 9432 - DNA, 391 bp, Triticum aestivum
  Clone ID: LIB29-002-Q1-E1-D3
ggtccggaataccgggtcgacttttccactatcaaccccaaaaaacccaactctgccttacgtaaagttgccagagtacgattaacctctggatttgaaatcactgcttatatacctggtattggccataatttacaagaacattctgtagtattagtaagaggaggaagggttaaggatttacccggtgtgagatatcgcattattcgaggaaccctagatgctgtcgcagtaaagaatcgtcaacaagggcgttctagtgcgttgtagattcttatccaagacttgtatcatttgatgatgccatgtgaatcgctagaaacatgtgaagtgtatggctaacccaataacgaaagtttcgtaaggggactggagcaggctaccatgagac

SEQ ID NO: 9433 - DNA, 316 bp, Triticum aestivum
  Clone ID: LIB29-002-Q1-E1-D4
ggtccggaattaacgggtcgactccgaggaactcactgtggaggagcgcaacctgctctctgttgcatacaagaatgtgattggagcccgccgtgcctcatggcgcatcatctcctccattgagcagaaggaggagagccgtggcaacgaggaccgggtcacgctcatcaaggagtaccgtggcaagatcgagactgagcttagcaagatctgtgatggcatcctcaagctgctcgaaacccaccttgtcccgtcttccactgcccctgagtccaaagtcttctatcttaagatgaatggtgactactacagatat

SEQ ID NO: 9434 - DNA, 234 bp, Triticum aestivum
  Clone ID: LIB29-002-Q1-E1-D5
accggtcaggacttcgcgggtggacggggtcgcaggctaggttaaggaaggagatcaacgaactcgcgcttaaaagatatcttcattttccagcgcgctttggattcctggagcgttgcaagatcacgctcaagtccgtggagaggaacaggtcgtgggaggtggaaggtgggataggggatccaccggtgagcaagccctgtgagtgccatacaccagggaggagggcggact

SEQ ID NO: 9435 - DNA, 480 bp, Triticum aestivum
  Clone ID: LIB29-002-Q1-E1-D6
taccggtcaggaattcccgggtcgcctacttgatccgctccaagtgggtgccctgcctcgagttcagcaaggttggcttcgttttccgtgagcacaacagctcccccgggtactacgatggtcgatactggacaatgtggaagctgcctatgttcgggtgcaccgacgccacacaggtgctcaacgaggtggaggaggtcaagaaggagtaccctgacgcctatgtccgcgtcatcggcttcgacaacctgcgccaggtgcagtgcgtcagcttcatcgccttcaggccaccgggttgcgaggagtctggcaaggcctaaactacgagttgaaacattggcctatgtatgaaggtcttttgtgaacttaacttttgtccaccactctgctggacgaccagagcatatttttcattctatatggtctgtgtgtgtatgtacgaacataggttctcgagcatgcatatgtaaattctagaac

SEQ ID NO: 9436 - DNA, 353 bp, Triticum aestivum
  Clone ID: LIB29-002-Q1-E1-D7
gggtcgacgacagcaacgtcttcgagtggcaggtcaccatcatcggcccgcccgagaccctatatgatggaggctatttcaatgcaataatgagcttcccacaaaattatccgaacagccctccaacagtcagattcacttctgaaatgtggcatcctaatgtttatccggatgggcgggtatgcatttctattcgtcatccacctggtgatgatcccaacggatacgagctcgcgagtgagcgttggacaccagtccatacggttgagagtatagtattaagcatcatttcgatgctttctagtccaaatgatgaatcaccggcaaatattgaagcagctaacgactggaga

SEQ ID NO: 9437 - DNA, 359 bp, Triticum aestivum
  Clone ID: LIB29-002-Q1-E1-E1
ggtccggattaccgggtcgacgagcctcccaggacaatccatcgactttttcggtgctctgcgtgctcgggtgtacgacgacgaggtgcgcaagtgggtgacctctaccggtatcgagaacattggcaagaagcttgtgaactcgcgggacggaccactgacctttgggcaaccaaagatgacagtcgagaagctgctagagtacgggcacatgctcgtccaggagcaggacaatgtcaagcgtgtgcagcttgctgacacctacatgagccaggcagctctgggtgatgctaaccaggatgcgatgaagactggttccgtctagggttagaacattctccatacacacccaacatctc

SEQ ID NO: 9438 - DNA, 481 bp, Triticum aestivum
  unsure at all n locations
  Clone ID: LIB29-002-Q1-E1-E11
ctggccgtaccagtccggatattcccgggtcgacaccttcccaggacaatccatcgactttttcggtgctctgcgtgctcgggtgtacgacgacgaggtgcgcaagtgggtgacctctaccggtatcgagaacattggcaagaagctggtgaactcgcgggacggaccagtgacctttgagcagccaaagatgacagtggagaagctgctagagtacgggcacatgctcgtccaggagcaggacaatgtcaagcgtgtgcagcttgctgacacctacatgagccaggcagctctgggtgatgctaaccaggatgcgatgaagactggtactttctacggttagaacattctccatacacacccaccatctcttgctgcataggaggaggtaaaggggcacagcaaggtactttgcctgtaccggcaggatgcaccgaccagactgccaagaacttcgnaccaacggcgaagagtgacgacg

SEQ ID NO: 9439 - DNA, 471 bp, Triticum aestivum
  Clone ID: LIB29-002-Q1-E1-E12
ctggccgtaccagtccggaattcgcgggtcgactatggtgggatgaagtagtcggaactgtgctgacgtgtccaaatatttgtatgcaggccttgatacatcctgcgcaggacagactgctcactgttcgtgaaagtgctcgattgcaaggttttcctgatagctacaggtttcgtggaacagtcaaagacaggtatcgccagattggaaatgctgtggccgtacccgttggccgtgcacttgggtatgccttggccatggccaacctgaacaagactggaaatgatcccctcatggagctaccacccaagtttgcattctctcatatagaaggcactccttagtcagactggcaaaacctaacggttgacttttccacctgggtttaagtctcgtcatctccgttcattctccgctagaaaagctgggtacctcatggtcgtgaatatcattaagactcgtgaatatcgt

SEQ ID NO: 9440 - DNA, 465 bp, Triticum aestivum
  Clone ID: LIB29-002-Q1-E1-E2
cgcccggtccggaattaccgggtcgacgacctgatccgctccaaatgggtgccttgcctctagttcagcaaggttgggtttatcttccgtgagcacaacgcatcccctgggtactacgatggccggtgctggacaatgtggaagctgcctatgttcgggtgcaccgacgccacgcaggtgatcaacgaggtggaggaggtcaagaaggagtaccctgacgcgtatgtccgcatcatcggattcgacaacatgcgccaggtgcagtgcgtcagcttcatcgccttcaagccaccgggctgcgaggagtccggcaaggcctaaacagctcactcaccacgggccacatataaagtgccattgcggttttgtcaactctgacattgctttgggttttccatttccatttatctttcctggttggtcccaagataagaataattgtaggtccatgttcccgacatgact

SEQ ID NO: 9441 - DNA, 423 bp, Triticum aestivum
  Clone ID: LIB29-002-Q1-E1-E3
ggtccggacttaccgggtggacgccctcgatggcaacaccaacttcgttcatggctttccttttgtgtgcgtctcgattggcctcaccattgggaagattcccaccgttggagttgtgtacaaccccatcatgaatgagcttttcacagctgttcgtggaaaaggtgcttttctcaatggttctccaattaaaacatcgcctcaaaatgagttggtgaaggctcttatggtgacagaggtatggaccaaaagagacaagtccactttggatgatacaaccaacagaattaataagttactattcaagattagatctatacgtatgtgtggctctttggctctaaacatgtgtggagttgcctgtggtatgctagatttgtgttatgagatcggttttggtggcccctgggatgtggctgctgg

SEQ ID NO: 9442 - DNA, 424 bp, Triticum aestivum
  Clone ID: LIB29-002-Q1-E1-E4
ggtccggatttaccgggtcgactacctgatccgctcaaagtgggtgccttgcctcgagttcagcaaggttgggttcatcttccgtgagcacaacgcatctcctgggtactacgatggccggtattggacaatgtggaagctgcctatgttcgggtgcactgacgccacacaggtgatcaacgaggtggaggaggtcaagaaggagtaccctgacgcgtatgtccgcatcatcggattcgacaacatgcgtcaggtgcagtgcgtcaacttcatcgccttcaagccaccgggctgcgaggagtccggcaaggcctaaacagctcactcacgacaggccatatataaagtgccattgcagttttgtcaactctgacattgctttggggttttccttctccatttatctttcatagttgttcctaag

SEQ ID NO: 9443 - DNA, 428 bp, Triticum aestivum
  Clone ID: LIB29-002-Q1-E1-E6
ccgtaccggtcaggacttcgcgggtcgaccgccgcggctaacaggtgctacgcaaccgtcgcgccccgtgcccgctcctccaccatcgtcgccagcctcggcacccccgcgccctccaactcctcctccttccgccccaagctcatcaggaacaccccagtccaggccgcgcccgtcgcacccgcattgatggacgccgccgtggagcgcctcaagaccgggttcgagaagttcaagaccgaggtctacgacaagaagcccgatttcttcgagcccctcaaggccggccaggcgcccaagtacatggtgttcgcgtgcgccgactcccgtgtgtgcccctcggtcaccctgggcctgtagcccggcgaggccttcaccatccgcaacatcgccaacatggtcacgtcctactgcaagaacaagtacgc

SEQ ID NO: 9444 - DNA, 472 bp, Triticum aestivum
  Clone ID: LIB29-002-Q1-E1-F11
tggccgtacaatccggaattcccgggtcgaccgcgagctgcatcgacatcgaccgattctcttcttctttggcggtctgcaccttccgtgcgggctgtggaggacggatgacgcggtgctgttagggcgctgacaggcagcggttctacgtcccctctccgagcagctctttcatgggacaggcaattgaaggtatggactacaacagtacagactgttatatatctggaaggcgaaattttggggcggtacctggttattgaatgacagacagttatataagagagaagattcctaggtttgccatgacagacaagatggtggcaaggccttgctcgttttagaggacatgggatacatacaggaagcagctgaaattgatgttggcaagtctggtatttagaagaaatctcatgaagtcattcaacaaacgtttgcgaacaagcaatttgtcttcctggacatggcttca

SEQ ID NO: 9445 - DNA, 427 bp, Triticum aestivum
  Clone ID: LIB29-002-Q1-E1-F12
gggtcgacatcgacatcgccaagaagcataatgctgggacaaacaaagctgctcatagcaccacatcgctcaatacaaagaggcttgatgatgatacagagaatcttgctcatgagcgtgtgccgtcagacctgaagaagagcattatgcaggctagaacggacaagaagctcacacaggcacagcttgcacagctgatcaatgagaagccacaagtcatccaggagtacgagtcaggcaaggctatcccaaaccaacggatcatcggcaagctggaaagggctcttggcacaaagctgcgaggcatgaagtgaagctgcgtgcatctgacaggagtcgagtctttcaagagaggagcttggctgggcaagtttaccgctaaataaagcttgtctactaaatcatgcgacttatgagaaccctggag

SEQ ID NO: 9446 - DNA, 411 bp, Triticum aestivum
  unsure at all n locations
  Clone ID: LIB29-002-Q1-E1-F2
ggtccggacttancgggtcgacagattgcgacaagcttttcctgcggttcccgtgtatgttagggctcaagacatgtctcatttgttggatctaaggaaagcaggtgcgaccgatgttgctctagaaaatgccgagactagcttgcaactaggctcgatgcttatgaaagggctgggtgtcatgtctgatgatgtatctttcttgagtaagcttgtgagggactcgatggagttacaagctcaggaggcactcaacaacgtcgaggatcgtgaaactactaccatggagtcacttcaggttagagtatcggacttggttgagtccaatgggaacggttccggaatgattccccgggagcaatcgctaggtctaagcagtcgcccgggaggtacngggtggataaaaacgac

SEQ ID NO: 9447 - DNA, 425 bp, Triticum aestivum
  unsure at all n locations
  Clone ID: LIB29-002-Q1-E1-F3
ggtccggaatatccgggtcgacctcaagagggtattcccagataaaaagatcggcaagataatcgaaacaagcctatcagcgaaccaagagcgcgccgccatggagaagaagaggctgaagtggaaggtggctgggcctcccccaaaagaaaatgtggtccgtggagggcccgtggacccctccaagctcgtcgtcgagctggcacccatggagatccgcacattcgtcatcaacttcgaccaccgactcgccgcacatccgatctaggcgccgacattgtaacttttttgtaattttgaaccagaatgttgtattgttgaagctgaactcgaatgagttgtgaatagcaataagaaataatgtggccaacggaggctggagcgtcatcaacttcttaaataagcttccgctagtgagatcaana

SEQ ID NO: 9448 - DNA, 459 bp, Triticum aestivum
  unsure at all n locations
  Clone ID: LIB29-002-Q1-E1-F4
ggtccggattacncgggtcgacaacctctacatttcacacatccaggtgaaccaagcccaaaagcagaggcgccgtacataccgtgctcacggacgcatcaatccttacatgtccaacccctgccacattgagctgatcttgtcagagaaggaagagcctgtgaagaaggaggctgataacgtcgtcgcaccaaggaaagctatctaagctaccggaatggatgcattcgcccaacagtcttagttgtagttcttctcaagtacctttgttggcagtgtttgttgcctccttgatgtttttgttaccaacattgagtaaggatttgttaaggttgatgttatccttgtgattgcgagtggtctttatatgctaaaacagtttcagatatttgagcattagcacaccagaacttatttctcagagatgctggtcctttcgggctcttcactttgaggtat

SEQ ID NO: 9449 - DNA, 401 bp, Triticum aestivum
  Clone ID: LIB29-002-Q1-E1-F5
accggtcaggacttcccgggtcgacgagtgctgctgcgaaccgtccatcatattcgtgagctgatcgaaacacgtacgcggtccagacgacggccgaccgatcgaccgaccgacgaaccatccgagccgagctacgtacctaacgtactggtagtagtacatgtgcgatttatatatgcgtgtcgtgtgtatgtgtgcttcccttgagctgttgctttcagctatagcaatagcatatgcccctagaggcctagaacagagtagaactgcagaaagaatagccagcccgtcctgccgttcggttcagctctccagcggcacgacgggtgggtggtgtgtgttgcatgtatgtatgtatctgatgtgatcccctaaaaaagagtatctgatgtgagtctacg

SEQ ID NO: 9450 - DNA, 464 bp, Triticum aestivum
  Clone ID: LIB29-002-Q1-E1-F8
ggtcgactcacctgccctcaagcacttgatttcctaggtggttgcggctcgcgcgccaactgctcgacgcaattccgctgcagaatcttctctgccatttgggggagcgcatgcggtgacggtgtttcctatggcgtgtgctccaaattatattgccattggcttttccaactatggtttagatacggggacaagggtactctcgccgagctacaagaacttcccacggaaatcctcctacaagtttctcaaggtccgtgctctgcatggaaatgatggccgtagaacgctgattgacataatctggatcatgccggagctgtcaatgaactatttcataaacgggtccatgagagctcttttcggcggcatcgcactgctgggtggcttttatgttgcgcagacattatccctgtcattcggtgctttgggcgttaacgatgttatcgcatgagttgtgtgtg

SEQ ID NO: 9451 - DNA, 464 bp, Triticum aestivum
  Clone ID: LIB29-002-Q1-E1-F9
tccggatttcccgggtcgacgggcgtttgggctgaactctgtgtcttcaactccggcgccaacgactggagaatcatcaccgaggtgtttgctgatgagctccctgacctctggtggtccgatgatgtgtttgctttcgacggccgtttcctttgctgggtggactacttctgcggcgtcgtgctatgcgacttctccaaaaatgtggactcccaggtgctccacttcgtgccttttcctggaggaatcaaatacccttttgacgcacggttcccgaggtacttcccagggaggttccgaagtgcgtccatcagccaaggcatgatccgctatatccacattgacaatgactttcatgagactacccactccgactggcaagtgatgattcctcctaagagaagccaacggcggcagcagcagcttccccacaaaatcaccatttggacgttgaactccaagtt

SEQ ID NO: 9452 - DNA, 472 bp, Triticum aestivum
  unsure at all n locations
  Clone ID: LIB29-002-Q1-E1-G10
cctgcccgtacagtccggaattcncgggtcgactcgtccgtggtcttcttcccgggccgtcgtcctcctcctccccttccccctccccctacatattccgtgttggcgcaggacatgtgataaagggacctgatgaagggatcttgtcgatgaaagttggaggattacgtcggttgtacatacccggtcaattagcattccctaagggccttacatcagctcccgggaggccaagagtggctccgagcagccccgtcgtatttgacgtcaacctattgttcgtacctggtcttgacgatgatgggtgaaagcatcatcttgcatctttacaggacgcaactgaagagagtgattttccttttgtgaattaccatgtgagtagagtgacaattgttttctgcagcataatatacaaaactatgatgatttgtattaagtgcatagcaacctttggttgtgaatgggataatgt

SEQ ID NO: 9453 - DNA, 455 bp, Triticum aestivum
  Clone ID: LIB29-002-Q1-E1-G2
cggtccggacttaccgggtggacgaggggacctccgactgcatcgtcacaagttactgcgaaggaggtgacatggcgcagaggatcaagaaggcaagaggcgtcctcttctcggaagagagggtgtgccggtggttcacacagttgctcttggcccttgactacctgcactgcaaccgcgtgctccaccgtgacctcaagtgttccaatatcttgttaaccaaggataacaacatacgacttgctgatttcgggttagcaaaattactcatggaggatcttgcgtcgtcggtagtaggaaccccaaactacatgtgcccagaaatactcgcggacataccttatggttacaaatctgatatatggtcgcttggttgctgtatgttcgagattttagcacagcgctctgcattcaaagctacagacatggcaacattagtcaacaaaataaacaga

SEQ ID NO: 9454 - DNA, 394 bp, Triticum aestivum
  Clone ID: LIB29-002-Q1-E1-G3
ggtccggaatacacgggtcgacttttccactatcaaccccaataaaaacccaactctgccttacgtaaagttgccagagtacgattaacctctggatttgaaatcactgcttatatacctggtattggccataatttacaataacattctgtagtattagtaagaggaggaagggttaaggatttacccggtgtgagatatcgcattattcgaggaaccctagatgctgtcgcagtaaagaatcgtcaacaagggcgttctagtgcgttgtagattcttatccaagacttgtatcatttgatgatgccatgtgaatcgctagaaacatgtgaagtgtatggctaacccaataacgaaagtttcgtaaggggactggagcaagctaccatgagac

SEQ ID NO: 9455 - DNA, 289 bp, Triticum aestivum
  Clone ID: LIB29-002-Q1-E1-G5
gggtcgacttccaccaaagcgaaatccaccatctcatcgaaagacgggacacctttgcctctatcaagtgggatcagatttccaggttgctcggtgagattttacagtttttcatagtttagatcgagtctgttcttcatacctacagtcgacaaagaagccacaatctacattaaggttagttcatcatatccgaaccaatcagagcctttgcataatcgttttagggtttgactttgctgaatttgccggtgcatcctcggtatacttgctggtcttaacgtccagt

SEQ ID NO: 9456 - DNA, 485 bp, Triticum aestivum
  Clone ID: LIB29-002-Q1-E1-G6
ggccgtacggtaaggaattcgcgggtcgactacctgatccgctccaaatgggtgccttgcctcgagttcagcaaggttgggttcatcttccgtgagcacaacgcatcccctgggtactacgatggccggtactggacaatgtggaagctgcctatgttcgggtgcaccgacgccacacaggtgatcaacgaggtggaagaggtcaagaaggagtaccctgacgcgtacgtccgcatcatcggattcgacaacatgcgccaggtgcagtgcgtcagcttcatcgccttcaagccaccgggctgcgaggagtccggcaaggcctaaacagctcactcaccacgggccacatataaagtgccattgcggttttgtcaactctgacattgctttgggttttccttctccatttatctttcttgtttgtccctaagaatatgtgtatgtccatgttcatgtaccaacatgtctcgagaaaacatgctcgt

SEQ ID NO: 9457 - DNA, 290 bp, Triticum aestivum
  Clone ID: LIB29-002-Q1-E1-G8
gggtcgacacgagaacttcaaaagcggcgtaatgaggtggcaattaacgggtggctgcaccagtatttcgagtcaggtgtttccatgtacgaagacaagtttgagttaactggtcgaagccgaagattatgccaggacacagcaagtaatccgccccaaaaaactaaatgggttacaaaagcaattccaaaaccctgcaacaacaactcccatgcttgacgtttgcaaatacccattttccctcccacttacaaggacaaaggagctaagagctctgactgggtggcggt

SEQ ID NO: 9458 - DNA, 474 bp, Triticum aestivum
  Clone ID: LIB29-002-Q1-E1-H10
cctggacgtacaagtccggaattcgcgggtcgactacctgatccgctcaaagtgggtgccctgcctcgagttcagcaaggttggcttcgtcttccgtgagcacaacagctcccccgggtactacgacggccgatactggacaatgtggaagctgcctatgttcgggtgcactgacgccacacaggtgctgaacgaggtggaggaggtcaagaaggagtaccctgacgcctatgtccgtgtcatcggcttcgacaacctgcgccaggtgcagtgcgtcagcttcatcgcctttaggccaccgggttgcgaggagtccggcaaggcctaaactacgagttgaaacaatggcctatctcgtatgaaggtcttttgtgaacttcacttttgtccaaaactctgctgtacgactctgctttctgaccggagcataccttttgttctatatgattttgtgtatgtatgtacgaacatagg

SEQ ID NO: 9459 - DNA, 476 bp, Triticum aestivum
  Clone ID: LIB29-002-Q1-E1-H12
cctggacgtaccagtccggatattccgggtcgacaaaatttgttccgacaattatgaacactctgaagagactagctgatgagggggcagcgcccgcagccccagagaggcagagagagacggagctccaaccaaggaataatagttcaaacagcaacgtgacatcagcaggttcctccagcttaacctcttcagagaatggacctgaatattcaagcccggtagcacaatgatgagtggatccctagcttttagctgaaagctctactagctgtagctgcaacggtttgagcctaggagattgaagtgccttgcggtttttgtacgctcgcttgcccttcccaacctgatatatgaaaattatgtggaagagtccacagctgttatataaggaattttggggctgggaatcgtttgtaagaaacattgtagaacaacttccgtttcacttttatttttgtaatatcttatatgat

SEQ ID NO: 9460 - DNA, 477 bp, Triticum aestivum
  Clone ID: LIB29-002-Q1-E1-H5
taccggtcaggacttcgcgggtcgacttttccactatcaaacccaaaaaacccaactctgccttacgtaaagttgccagagtacgattaacctctggatttgaaatcactgcttatatacctggtattggccataatttacaagaacattctgtagtattagtaagaggaggaagggttaaggatttacccggtgtgagatatcgcattattcgaggaaccctagatgctgtcgcagtaaagaatcgtcaacaagggcgttctaaatatggggtcaaaaagccaaaaaaataagtgattttagcccttataaaaagaaaacggattcttgaacctctttcacgctcatgtcacgtcgaggtactgcagaaaaaagaactgcaaaatccgatccaatttttcgtaatcgattagttaacatggtggttaaccgtattatgaaagacggacatcatcattggcttatcaaattctctat

SEQ ID NO: 9461 - DNA, 448 bp, Triticum aestivum
  Clone ID: LIB29-002-Q1-E1-H7
ggccgacttttccactaacaaacccaaaaaacccaactctgccttacgtaaagttgccagagtacgattaacctctggatttgaaatcactgcttatatacctggtattggccataatttacaagaacattctgtagtattagtaagaggaggaagggttaaggatttacccggtgtgagatatcgcattattcgacgaaccctagatgctgtcgcagtaaagaatcgtcaacaagggcgttctaaatatggggtcaaaaagccaaatgaataagtgattttagcccttataaaaagaaaacggattcttgaacctctttcacactcatgtcacgtctaggtactgcagaaaaaagaactgcaaaatccgatccaatttttcgtaatcgattagttaacatggtggttaaccgtattatgaaagacggaaaataatcattggcttatc

SEQ ID NO: 9462 - DNA, 442 bp, Triticum aestivum
  Clone ID: LIB29-002-Q1-E1-H9
gtcgacccagagtaattacaatggttgaatctgatcctttccatggttacgaaactgaaactattgtggcacatcttactaagttgaataacatagccaccctttttactcatgatgagaagacttgctattactacattctcaaattatttctgttctcattaaagggtgatgctaaagcttggtacaatactcttgctactggttgtgtgcgtagtccccaggatatgatttattacttctctgaaaaatatttccctgctcataagaaacaagctgccttacatgaaatatttaagtttgtgcaaattaaagaagagagtctcccacaagcttggcggaggctttgccaattacttaatgctttgcctgattatcctcttaagaaaaatgaaatgcttgatatcttctataatggagtaaccgatgcttctagggattt

SEQ ID NO: 9463 - DNA, 321 bp, Triticum aestivum
  Clone ID: LIB30-001-Q1-E1-A1
tgctgacaacaggaatggcatcgccatcggcaacacgcctggtgttcttactgagacgacggcggagctagcggcatcgctgtcggtggcggctgcccggaggatcgttgaggccgaccaattcatgagggctggcctctacgacggatggctcccgcacctgtttgttgggaacttgctcaaggggcagactgttggagtgatcggagctggccgcatcggctcagcttatgcaaggatgatgattgaggggttcaagatgaacttgatctacttcgacctgtaccagtccacacggctcgagaaattcgtcaccgcgta

SEQ ID NO: 9464 - DNA, 460 bp, Triticum aestivum
  unsure at all n locations
  Clone ID: LIB30-001-Q1-E1-A10
tacggtcttatcttcncgggtcgacaatagcgggacaatcgttgggatcaaatgcaaagatggaattgtccttggtgtggagaagctgataacctcaaagatgatacttgccgggtcgaaccggagacttcattctgtgcaccggaactctggcttggctgtggctggattagcagcagacggtaggcagatagtctcaagagcaaagtcagaagcagccaattatgaaaaggtatacggagaacccatgcctgtaaaggaattagctgatcgcgttgctagctatgttcatctgtgtacactctactggtggctcaggccttttggctgtggagttattcttggaggctatgatagggatgggccacagctctacatgatcgaaccttcaggcctctcctagaaatattttggtgctgctctgggtaaaggatgacgagctgcaaagacggagattgag

SEQ ID NO: 9465 - DNA, 417 bp, Triticum aestivum
  Clone ID: LIB30-001-Q1-E1-A11
acctggcctcacagtccatcgcgctgggctcgctcatcggcgcctgggtcagcagcacaagcaaggtgttcatgacggagctcgtctacggcgacaacagccaggcaacggcggcggtaagtacatcgccctcctcgtctgctttctggtgtccttcacttgcttcatccactccgcgaagtactatgtccaaaccagcttcctggtgaccacgctggactctgacgtctcggcgagctacatgcagcatgcggtgatccggggcggcaacttctggtccatggggctcctagcactctacttctcaacgacgctgctgatgtggatattcgggcccataccgatgtctgtctgctcagtgttcatggtgttcatcctacacatgctggacagcaactccctgcccctgcaccagta

SEQ ID NO: 9466 - DNA, 447 bp, Triticum aestivum
  Clone ID: LIB30-001-Q1-E1-A2
cggtctagtagtccgggccgacagacgacagaagggacacatcttgctcttgctcttccccttgccttatcccctttcccactccaaaattgctgccgccggtagctcccatcagcttgattccctgattcagtgccttgagcttgctcgtcctcacctacagccagccccgcagcttgattcatttgtgcggccatagcgtgaccttcgacggcggctggtttgtctcttgatctcctcgtacgcctcctcggtctcctcctaggctggtaaacgtcgatggagtggtaggagggcccaaggtgcagctgctcaagggaggaggcgagatcatcaatctgcacgatgttgttgctgtcaatgtccgtgcaggtgatgttggcgtggatttcgtctcccacaactgctttgatccatctttagtatcaggatggtggagatgttttc

SEQ ID NO: 9467 - DNA, 420 bp, Triticum aestivum
  Clone ID: LIB30-001-Q1-E1-A3
ctgagaagaaacaaaaggggatacctctagaagtctagatctaggcctgacctgtagtttcctgatcgtgttcgcctcgatctcggggtaagctcagttcggcgtccatgatttgttcccatcacccgtttgttatctgaatcccaggtttctccttctgatcggcgagttggggcttgcggcgatcttggagaaaagacgggaggcaagctgcatctgcgcacggaagcttccgatctgcccggctggcgtctcagatctgttgctgatctgatgcttcacggcggatctggttgttcccggcggtctcaagtcggcgcagcggctggcggcgagttttccggcaagcacgtgggatcccgtctgctcctctacctcgtgcgacgacggccaacggctctttgtgttgataataattat

SEQ ID NO: 9468 - DNA, 443 bp, Triticum aestivum
  Clone ID: LIB30-001-Q1-E1-A4
accggtctagtaatcccgggccgaccgacagatcgaggacagctgcggtgcacttgtcacctcaaccagccgagcactcctcctcctcgccgtcgtcgtctccgatccactaccgcttccgcagccatggtgaacgttccgaagacggggaatacctactgcacgaacaacgactgcaggaaacacaccctccacaaggttacccagtacaacaaaggcaaggacatgcctttctgctcacgggaagcgtcgttacgaccgcaagcagtctgcatatggtggccacacaaaccctgttttcaacaagaaggccaaggcaacaaagaacattgtgctgaagctgcactgccagacctgcaagcatttctcacagcgtgccatcaccaagtgcaagcacttttaaatccgtggccacaagaacggccgtggaacatccctcttca

SEQ ID NO: 9469 - DNA, 423 bp, Triticum aestivum
  Clone ID: LIB30-001-Q1-E1-A5
gacaccttcacaaaacaatccatcgactttttcggtgctctgcgtgctcgggtgtacgacgacgacgtgcgcaagtgggtgacctctaccggtatcgagaacattggcaagaggctggtgaactcgcgggacggacccgtgacctttgagcagccaaagatgacagtggagaagctgctatagtacgggcacatgcttgtccaggagcaggacaatgtcaagcgtgtgcagcttgctgacacctacatgagccaggcagctctgggtgatgctaaccaggatgcgatgaagactggttccttctacggttagaacattctccatacacacccaccatctcttgctgcataggaggaggtaaaggggcacagcaaggtactttgcctgtacaagcacgatgcaccgaccagactgccaacaact

SEQ ID NO: 9470 - DNA, 438 bp, Triticum aestivum
  unsure at all n locations
  Clone ID: LIB30-001-Q1-E1-A7
aattcnccggccgacacaggcatctttgagcttctggcagtcgtatcgatcagctagacgcagtacaacagccacattatcgacatcaaggttcaggcacaagatgcgttcacacataagcttcaacctatctagaccatattgatccgctgctgcaaatagatgctggaccacggcatttctttcagatctgtcaagatcatccattgtaggcaaggaatcagtgtaaacgaaatggagcagagcctcgaaaaccaccggttccatgcgatcaacggttatgtgccgcatcttgttctccttcatgggttcacttagctgcgctttgaaaactggcgacctggcagagagcactgccctgtgggcaggaaacatttctcctctaactttgaaggtcacatctgctctggacttatccttcagcatcttgccaaaatg

SEQ ID NO: 9471 - DNA, 404 bp, Triticum aestivum
  Clone ID: LIB30-001-Q1-E1-A8
ggaaggggcggaattttctcacttgtatgccaagtcgcctcctcccgatccgcgtcccctccctcgccaagcccacagctctcagatttgctaaacatatggcttcaaatactggcaagaagctcattcagatcgacgtgagctcagatacagtgtgcccttggtgctttgttgggaaaaggaatcttgagaaagctatggagcaaaccatggacaagttcgatttcgaggttcgttggcatccattttttttgaaccctgatgcacctaaggaaggtgtcaagaaatctgatttctacaagaccaagtttggccctgtgcagtttgagcgtgcaactgctcgcatgagagagatgttccgaggacttggctttgaatatgacatgtcaggactcaccgggaaa

SEQ ID NO: 9472 - DNA, 319 bp, Triticum aestivum
  Clone ID: LIB30-001-Q1-E1-A9
cgggatgggagaagcgtcatctccggcgatcgccaaggatgtcaccgagctgatcgggaacacgccgctggtgtacctcaacaaggtgaccgacgggtgcgtggggcgcgtcgccgccaagctcgagtccatggagccctgctccagcgtcaaggacaggattggatacagcatgatcaccgacgcggatgaaaaagggttcatcgtcccaggcaagagtgtcctgattgagccaaccagtggcaacacaagcattgggctgggcttcatggctgctgccaagggttacagacttgtactcacaatgcccgcatccatg

SEQ ID NO: 9473 - DNA, 416 bp, Triticum aestivum
  Clone ID: LIB30-001-Q1-E1-B1
ctcggtggagaacaccggggttagggtttaggggcctggatccatggctcggcccatgggatccagcggcttcgaggctgccctagccgtgtgccccgccgccgcccaggcctactcgaagtactgcggtattgtatctggatgcgcaaatgcgaacccaagggaagggttggcggatctttcacgaactatagataatatggaaggaatgagggatggaatatttggtgatattcacaagctcatgtcagttcttgatttcgatgatgtgagccaattcaattccttctatgattttgtcttcttcatttctcgtgaaaatggccaaaagaatattactgttcagaaggctcttgcagcatggaggatagttcttgttggaagattccgattgcttgaccggtggtgtaactttg

SEQ ID NO: 9474 - DNA, 386 bp, Triticum aestivum
  Clone ID: LIB30-001-Q1-E1-B10
tacggtcttatcttccgggtcactacctgatccgatcaaagtgggtgccttgcctcgagttcagcaaggttgggtttatcttccgtgagcacaacgcatcccctgggtacaacaatggccggtactggacaatgtggaacctgccaatgtcggggtgcaccgaccccacccaggtattcaacgaggtggaggaggtcaagaaggagtaccctgacgcgtatgtccgcatcatcggattcgacaacatgcgccaggtgcattgcttcagcttcatcgccttcaagccaccgggctgccacgattccggcaaggcctaaacagctcactcaccaggggccacatataaagtgccattgccgttttgtcaactctgacattgctttggg

SEQ ID NO: 9475 - DNA, 457 bp, Triticum aestivum
  unsure at all n locations
  Clone ID: LIB30-001-Q1-E1-B11
ccgggtcgacgaccactggccaccagatctacaagcttggaggcattgacaagcgtgtcatcgagaggttcgagaaggaagccgctgagatgaacaagaggtctttcaagtacgcgtgggtgcttgacaagctcaaggccgagcgtgagagaggtatcaccatcgatattgctctctggaagttcgagaccaccaagtactactgcaccgtcattgatgcccctggtcaccgtgacttcatcaagaacatgatcaccggtacctcccaggctgactgtgctgttctcatcatcgactccaccactggtggttttgaggctggtatctccaaggatggccagacacgtgagcacgccctccttgctttcactcttggagtgaagcagatgatctgctgctgcaacaagatggacgccnacactcccaagtactcaaaggggcgttatgaagaaattgt

SEQ ID NO: 9476 - DNA, 436 bp, Triticum aestivum
  Clone ID: LIB30-001-Q1-E1-B12
tacggtcttatcttcccgggtcgacagattgtataaaatattatgtgcatgtgcatatacatagccaccgattgcattcacatacgagcacgctttctcgagccatgttgttacatgaacatggacatacacatattcttaggaacaagtaagagagacaaatggagaaggaaaacccaaagcaatgtcagagttgacaaaactgcaatggcactttatatgtggcccgtggtgagtgagctgtttaggccttgccggactcctcgcagcccggtggcttgaaggcaatgaagctgacgcactgcacctggcgcatgttgtcgaatccgatgatgcggacgtacgcgtcagggtactccttcttgacctcctccagctcgttgatcacctgtgtggcgtcggtggcaccgaacataggcagcttccacatttgtca

SEQ ID NO: 9477 - DNA, 278 bp, Triticum aestivum
  Clone ID: LIB30-001-Q1-E1-B2
ccgggccgacattgcaaaggataaacagggccgtgccgcagacgtagttccaatagcaagaggccctcctaagccagtcggcaacacctgaaaaaatgcgtgttgtgctgatgcttgttgcttaaaaaataagtgtaaataaagtagattgcgatgctcttagagaaaagccgatgtgtaattatgctgaattttatgttttgcaagaacataattttttaatgtaatcgacgcgtaatattgtgtcgaattttatgttctgcaagaacaacagatcc

SEQ ID NO: 9478 - DNA, 432 bp, Triticum aestivum
  Clone ID: LIB30-001-Q1-E1-B4
gggccgactacctgatccactacaagtgggtgccttgcctcgagttcagcaaggttgggtttatcttccgtgagcacaacgcatcccctgggtactacgatggccggtactggacaatgtggaagctgcctatgttcgggtgcaccgacgccacgcaggtgatcaacgaggtggaggaggtcaagaaggagtaccctgacgcgtatgtccgcatcatcggattcgacaacatgcgccaggtgcagtgcgtcagcttcatcgccttcaagccaccgggctgcgaggagtccggcaaggcctaaacagctcactcaccacgggccacatataaagtgccattgcggttttgtcaactctgacattgctttgggttttccttttccatttatctttcttgtttgttcctaagataagaatatgtgtatgtccatg

SEQ ID NO: 9479 - DNA, 436 bp, Triticum aestivum
  unsure at all n locations
  Clone ID: LIB30-001-Q1-E1-B5
aattcccgggccgacatgtgtaagggagtgcagtatctgaatgaaatcaaggactctgttgtggctgggttccagtgggcatcgaaagaaggtgctttggctgaggagaacatgcgtggcatctgctttgaggtctgtgatgttgttctgcacactgatgctattcacaggggtggtggccaggtcatcccaacagccaggagggtcatttatgcttctcagctcactgctaagccaaggctgctggagcctgtgtacctggttgagatccaggccccggagaatgcacttggcggtatctatggtgttctgaatcagaagagagggcacgtgtttgaggagatgcagaggcctggtaccccgctgtacaacatcaaggcttacctcncggtcatcgagtcgttcgggttctcaagtaccctcaaggctgcgacat

SEQ ID NO: 9480 - DNA, 440 bp, Triticum aestivum
  Clone ID: LIB30-001-Q1-E1-B7
aattcgcgggccgacagacgaaagaagggggcttcatccatcacatccagatcgaaactagaagcagagtaatcgagctaggattgaacagaggaggggaggaagaagcttagggggtgccggccatggcgagcctgatggacaaggccaaggggttcgtcgccgacaagatcgcgcacatgcccaagccggaggcgtcgctggacaaggtgaccttcaagggcatgacccgcgaggccatcaccgtgcacagccacgtcaacgtcaccaacccctactcccaccgcatccccatctgcgacatcgccttcaacctcaagtgcggcggcaaggaggtggcgagcggcacgatcccggacccgggctggatcgaggacagcggcgaggtcaccaagctggaggtgccggccaaggtgccctacgacttcctcatctctctc

SEQ ID NO: 9481 - DNA, 399 bp, Triticum aestivum
  Clone ID: LIB30-001-Q1-E1-B8
gactcgcgcttcgctctcagatcccttctcctccgtctcgcccgcgtgttggggtaggagccatggcggaccagctcaccgacgaccagatcgccgagttcaaggaggccttcagcctcttcgacaaggacggagacggctgcatcaccaccaaggagcttggaactgtgatgcgctcgctggggcagaaccccactgaggcagagcttcaggatatgatcaatgaagtggatgctgatggcaatggaacgattgactttcctgagttcctcaacctgatggcgcgtaagatgaaggacactgattccgaagaggagcttaaggaggctttccgcgtgtttgacaaggaccagaatggtttcatctcggcagctgaactcagccatgtcatgactaacc

SEQ ID NO: 9482 - DNA, 395 bp, Triticum aestivum
  unsure at all n locations
  Clone ID: LIB30-001-Q1-E1-B9
cgggtcgacaccttcccaggaaaaaccatcgactttttcggtgctctgcgtgctcgggtgtacgacgacgaggtgcgcaagtgggtgacctctaccggtatcgagaacattggcaagaggctggtgaactcgcgggacggacccgtgacctttgagcagccaaagatgacagtggagaagctgctagagtacgggcacatgcttgtccaggagcaggacaatgtcaagcgtgtgcagcttgctgacacctacatgagccaggcagctctgggtgatgctaaccaggatgcgatgaagactggttccttctacggttagaacattctccatacacacccaccatctcttgctgcataggangaggtaaaggggcacagcaaggtactttgcctgta

SEQ ID NO: 9483 - DNA, 417 bp, Triticum aestivum
  Clone ID: LIB30-001-Q1-E1-C11
gggtcgacagacgacataaaggacaaatcgaggctccttccgtttttccctgtggggcggaggttctttgcctggtgacacccaaacctgaagcgaacccacgctgttcgccgacccgtccactgctgctccggccagccatgagggtcctcgcgttcctcctcctactagggatctctgccgccgccactgcatcccctccgccgctcgagaccctcggcatccctccgcaagatgaggcgtactacaggggcggcgtgatcaagtgcagggacggatcgggcaagttcaccagggatcagctcaacgacgacttctgcgactgtcccgacggcaccgacgagccagggacatccgcgtgcccggaggcgaaattctactgcaataatgccggacattctccaatcaccatcttct

SEQ ID NO: 9484 - DNA, 442 bp, Triticum aestivum
  unsure at all n locations
  Clone ID: LIB30-001-Q1-E1-C12
cggtcttatnttcncgggtcgacaccttcccaggacaatccatcgactttttcggtgctctgcgtgctcgggtgtacgacgacgaggtgcgcaagtgggtgacctctaccggtatcgagaacattggcaagaggctggtgaactcgcgggacggacccgtgacctttgagcagccaaagatgacagtggagaagctgctagagtacgggcacatgcttgtccaggagcaggacaatgtcaagcgtgtgcagcttgctgacacctacatgagccaggcagctctgggtgatgctaaccaggatgcgatgaagactggttccttctacggttagaacattctccatacacacccaccatctcttgctgcataggangatgtaaaggggcacagcaaggtactttgcctgtaacggcaggatgcaccgaccagactgccaagaac

SEQ ID NO: 9485 - DNA, 439 bp, Triticum aestivum
  Clone ID: LIB30-001-Q1-E1-C2
ccgggccgaccgagaagacgacaaaagggcatcgagtagaccctgttattgtgagaattcttaattcaagagttatagggagggacttatgtcaccacaaacagaaactaaagcaggtgttggatttaaagctggtgttaaagattataaattgacttactgcaccccagagtatgaaactaaggatactgatatcttggcagcattccgagtaagtcctcagcctggggttccgcccgaagaagcaggggctgcagtagctgccgaatcttctactggtacatggacaactgtttggactgatggacttaccagtcttgatcgttacaaaggacgatgctatcacatcgagcctgttgctggggaagacagccaatggatctgttatgtagcttatccattagacctatttgaagagggttccgttactaacatgttt

SEQ ID NO: 9486 - DNA, 448 bp, Triticum aestivum
  Clone ID: LIB30-001-Q1-E1-C9
cccgggtcgacaccttcccaggacaaaccatcgactttttcggtgctctgcgtgctcgggtgtacgacgacgaggtgcgcaagtgggtgacctctaccggtatcgagaacattggcaagaagcttgtgaactcgcgggacggaccagtgacctttgagcagccaaagatgacagtcgagaagctgctagagtacgggcacatgctcgtccaggagcaggacaatgtcaggcgtgtgcagcttgctgacacctacatgagccaggcagctctgggtgatgctaaccaggatgcgatgaagactggttccttctacggttagaacattctccatacacacccaccatctcttgctgcataggaggaggtaaaggggcacagcaaggtactttgcctgtgccggcaggatgcaccgaccagactgccaagaacttcgacccaacggcgagg

SEQ ID NO: 9487 - DNA, 435 bp, Triticum aestivum
  Clone ID: LIB30-001-Q1-E1-D1
ccgggccgactacctgatccactacaagtgggtgccttgcctcgagttcagcaaggttgggttcatcttccgtgagcacaacgcatcccctgggtactatgatggccggtactggacaatgtggaagctgcctatgttcgggtgcaccgacgccacacaagtgatcaacgaggtggaggaggtcaagaaggagtaccctgacgcgtatgtccgcatcatcggattcgacaacatgcgccaggtgcagtgcgtcagcttcatcgccttcaagccaccggactgcgaggagtccggcaaggcctaaacagctcactcacgacaggccatatataaagtgccattgcagttttgtcaactctgacattgctttgggttttccttctccatttatctttcttatttgttcctaagaatatgtgtatgtccatgttcatg

SEQ ID NO: 9488 - DNA, 455 bp, Triticum aestivum
  Clone ID: LIB30-001-Q1-E1-D10
gggtccacgtagatgctgcaaaaaggaatggcatcgccatcggcaacacgcctggtgttcttactgagacgacggcggagctagcggcatcgctgtcggtggcggctgcccggaggatcgttgaggccgaccaattgatgagggctggcctctacgacggatggctcccgcacctgtttgttgggaacttgctcaaggggcagactgttggagtgatcggagctggccgcatcggctcagcttatgcaaggatgatgattgaggggttcaagatgaacttgatctacttcgacctgtaccagtccacacggctcgagaaattcgtcaccgcgtatggccagttcctgaaagccaatggtgagcagcccgtgacatggaagagggcttccagcatggaggaggtcctcagggaggctgatgtgataagcctgcaccaagtgctggacaagacaacg

SEQ ID NO: 9489 - DNA, 335 bp, Triticum aestivum
  Clone ID: LIB30-001-Q1-E1-D11
gggtcgactcggtgcttgtagatacccaagggctttcagcaagagaaggtggtgaccggcaagatctcggagatgcgatcgtcgtcgtagttgtagtggtggtgcttgcactgctagagttgtagaggaacgcagcgtgcagcccaatcctattatcaagttgggctctggtatgcaacggatgaaacgtctgtgtaaagaactgtagtctcaaggtctgtgtggtcagctaggtccgagagtggtttgtgtgtcctccagtcttcccatgggtaaatttttttctcgccctgggtgcaaattagactttggtgctgcggataaaacccgttgtg

SEQ ID NO: 9490 - DNA, 435 bp, Triticum aestivum
  Clone ID: LIB30-001-Q1-E1-D12
gggtcgacaccttcccaggaaaaaccatcgactttttcggtgctctgcgtgctcgggtgtacgacgacgaggtgcgcaagtgggtgacctctaccggtatcgagaacattggcaagaagctggtgaactcgcgggacggaccagtgacctttgagcagccaaagatgacagtggagaagctgctagagtacgggcacatgctcgtccaggagcaggacaatgtcaagcgtgtgcagcttgctgacacctacatgagccaggcagctctgggtgatgctaaccaggatgcgatgaagactggtaccttctacggttagaacattctccatacacacccaccatctcttgctgcataggaggacgtaaaagggcacagcaaggtactttgcctgtaccggcaggatgcaccgaccagactgccaagaacttcgacca

SEQ ID NO: 9491 - DNA, 445 bp, Triticum aestivum
  unsure at all n locations
  Clone ID: LIB30-001-Q1-E1-D2
accggtctagcagtcccgggccgacaccttcccagaacaatccatcgactttttcggtgctctgcgtgctcgggtgtacgacgacgaggtgcgcaagtgggtgacctctaccggtatcgagaacattggcaagaagcttgtgaactcgcgggacggaccagtgacctttgagcagccaaagatgacagtcgagaagctgctagagtacgggcacatgctcgtccgggagcaggacaatgtcaagcgtgtgcagcttgctgacacctacatgagccaggcagctctgggtgatgctaaccaggatgcgatgaagactggttccttctacggttagaacattctccatacacacccaccatctcttgctgcatangangaggtaaaggggcacagcaaggtactttgcctgtgccggcaggatgcaccgaccagactgccaagaact

SEQ ID NO: 9492 - DNA, 373 bp, Triticum aestivum
  Clone ID: LIB30-001-Q1-E1-D3
ccggtctagtagtccgggccgacggctacagccaaaactacacgccagaggaatggtctgagtctggtgaccgctacgccggcggaacgaccgggcttcttatctgggccgtcaccctcgccggcctcctcggcggcggcgtcctcctcgtctacaacaccagcgctctcgccggctaagagagcatctacgtgtaacacagggccgggtctctgcttgcatgcacgtctctgtaatctgcgtagctacctcctgtgaatgtatgcaatcaacgatgcaaagtaattgatccgaacagatggtttatgtgtatgtacgtaacgctgttacgatatacttcctactttggaaactgtaaaagggtggattctcg

SEQ ID NO: 9493 - DNA, 356 bp, Triticum aestivum
  Clone ID: LIB30-001-Q1-E1-D4
cacggggaaatcaaccaggtctttcactcgcgcttctcgctgctgccaaccgctggccgccggccttgccaacttccgctgccatccgtatcgagggccctcggggacgccacgacgggtgtggggtgtctgctgatgtttgctgcttcttctccttccctcactagcttctccgctcgtgttgcctgctgccgccgactgataaactaatccgtgaactgttgttgaagggccgaatgagcaagactgctgcaagatgaaggtaacactggcgaaacagcaaatcatggtccaggaaagcatatatgtacttattggccatatccaggcatcttttggtcagtccggtgtgttct

SEQ ID NO: 9494 - DNA, 416 bp, Triticum aestivum
  Clone ID: LIB30-001-Q1-E1-D9
gcccctagaaacacttctcttcacccttcagttttgttaactctgcttcatctttcgcaattgccaattcggccttttcaacttcctgattccgaataacgacaccacttttatatgtagctacgtgcttctttaacttctccctcgccgccttgccagcttcccagcatgtattcttgcaagtgccattgctaccgtattcgtcactcccgtcacagcaatcgcatataccatcattcactcgcgacgagaagatggtgattggagaatgtccggtattcttgcagtagaatttcgcctccgggcacgcggatgtccctggctcgtcagtgccgtcgggacagtcgcagaagtcgtcgttgagctgatcctggtgaacttgccgatccgtcccggcacttgatcacccgcccctg

SEQ ID NO: 9495 - DNA, 410 bp, Triticum aestivum
  Clone ID: LIB30-001-Q1-E1-E1
ctgatgagggacttcaagcggctgatgcaggaccctcctgcgggcataagcggggcgccgcaggacaacaacataatgctgtggaatgctgtgatttttggccctgacgatagcccgtgggatggaggcacgtttaagctgactctccagtttaatgaagaatatcctaataagccaccaacagttcggtttatttctcggatgtttcaccctaacatttatgctgatggaagcatatgcttagatattctacagaatcagtggagcccaatatatgatgtagctgctatacttacatctatccagtcgctgctgtgtgatcctaacccaaattcgcctgctaactcagaagctgcccgcatgttcagtgagaacaagcgagagtacaaccgcaaagtgcgggagattgt

SEQ ID NO: 9496 - DNA, 457 bp, Triticum aestivum
  unsure at all n locations
  Clone ID: LIB30-001-Q1-E1-E11
cggtcctatnttcccgggtccaccatggcggcagggaaatgttccatggccacgccgaccccgtcgtccacgagctcaacaggctggagaatctcctcagagaaaaggaacgagaactaggacacgcatacagtgaaataaaaggtctgaaggtgacagaagctctgaaggacaaggccattgctgagctgagcaaggagctgaagaaacaggacgagaggctgagcatcctggagaagcagcttgagcagaagaatctggatgtgaaaaggatatgcaatgagcgcaaggaagcgttgtctgcacagttcgctgccgaggcatcgctcaggaggatccactcggctcagagagacgaggaagtggttccctttgatgccatcatagggcccctggagtctgacatcaagaagtacaagcatgagattgcggtgctccaggatgacaaaaagggctc

SEQ ID NO: 9497 - DNA, 271 bp, Triticum aestivum
  Clone ID: LIB30-001-Q1-E1-E12
ctctctcataagacccctgggtggtggccaacctggaagagtgaagcggaagaaccagaagaaggcctcaggtggtggtggtgatgacggcgacgaggaggaagactaagcgcccagcctcacccgcataactttcgttgcagaaatgttgagattgccttgtggaactcggaaatgattcaaactttccttcttagaaacttaatggtgtagagctttcgttggttcagaatcttttggctgtcggttctaaaattaaacttatgtgtgt

SEQ ID NO: 9498 - DNA, 385 bp, Triticum aestivum
  Clone ID: LIB30-001-Q1-E1-E2
aggatatgaacaagactgtagcaatcaatactctctctgagtacatgatgcacctcctggtcaagcaccctgacattctgctcgtcaatacagattctcggggattgattgacaaagcctggtactcttgcataccgctgtttgtatcatattctgcggatgattatgaccaggaatttatggattacaaggtataaccttctaagtacttggggctaccataatactttaatcaatatattgaacaggataaagaatatacttcccagggcgaagccatgctggtgaaagcaagcagcattgctcgcacaatgctatacatggatctggggctagtagattagatggttataaacggaacaatgtgcacggagatgttgtgcta

SEQ ID NO: 9499 - DNA, 450 bp, Triticum aestivum
  unsure at all n locations
  Clone ID: LIB30-001-Q1-E1-E3
acggtctagtagtccgggccgacacaggatttcatcattatcggcctatagccattggccatagtacaaaagatacttctcttttccctataaccttttgggcgacttcggtgcaaagcttgccacagagaagtatcattgtgctgacgatctgggctgaatgccgcagaatgcaacagctgcattcatcactacagaatggttgatttaaggggcagttgaagcaacttttgggtaatcattatcgggctgcgcttcccattctgtccaagatccgtcgtaaactggaacgtcatgcttaccgattctatagaggcccagggcaagtatgcaggcagttacaccagatccacatgtgacgacaatcgggtgatcgagcaaaatgccttcttgctcaaacttttttgatagctcatctgcagggaggagcgtntgtgcaccatcaaacat

SEQ ID NO: 9500 - DNA, 156 bp, Triticum aestivum
  unsure at all n locations
  Clone ID: LIB30-001-Q1-E1-E4
tcaangatttacacatggatanaaatgactactatggaggagattccacctccctcaacttgaaccagctctggaagaagttcaggggggaagaaaaaccaccggcgcatttaggtgcgagcagagactacaatgtagacatggttccagaggttt

SEQ ID NO: 9501 - DNA, 301 bp, Triticum aestivum
  Clone ID: LIB30-001-Q1-E1-E5
aattcgcgggccgacggctacagcccaatctacacgccggaggaatggtctgaatctggtgaccgctacgccggcggaacgaccgggcttcctatctgggccgtcaccctcgccggcctcctcggcggcggcgtcctcctcgtctacaacaccagcgctctcgccggctaagagagcatctacgtgtaacacagggccgggtctctgcttgcatgcacgtctctgtaatctacgtagctacctcctgtgaatgtatgtcatcaacgatgcaaagtaattgattcgaacagatggtttatgt

SEQ ID NO: 9502 - DNA, 425 bp, Triticum aestivum
  Clone ID: LIB30-001-Q1-E1-F1
cccgggcggccatcgagccagatgagcatgtcaagcaggcgatgaatgagatcaatgcagctgcaaggatgacggtggctgcaaacgagaaggcggaggctgagaagattgtccagatcaagcgtgccgagggtgaagcagaggccaagtacctgtctggcctcggtatcgcccgccagcgccaggccattgtggatggcctgagggacagcgtcctgggcttctcagtcaatgtgcctggcaccactgcaaaggatgtgatggacatggtgctgatcacccagtacttcgatactatgaaagagattggcgcgtcctccaagtcctcggcggtgttcatcccccatggccctggtgcggtgcgcgacatcgccacgcagatccgtgacggtcttcttcaaggccagtctgcctctgacaactag

SEQ ID NO: 9503 - DNA, 392 bp, Triticum aestivum
  unsure at all n locations
  Clone ID: LIB30-001-Q1-E1-F12
catcgagtagaccctgttattgtgagaattcttaattcaagagttatagggagggacttatgtcaccacaaacagaaactaaagcaggtgttggatttaaagctggtgttaaagattataaattgacttactacaccccagagtatgaaactaaggatactgatatcttggcagcattccgagtaagtcctcagcctggggttccgcccgaagaagcaggggctgcagtagctgccgaatcttctactggtacatggacaactgtttggactgatggacttaccagtcttgatcgttacaaaggacgatgctatcacatcgagcctgttgctggggaagacagccaatggatctgttatgtancttatccattagacctatttgaagagggt

SEQ ID NO: 9504 - DNA, 420 bp, Triticum aestivum
  Clone ID: LIB30-001-Q1-E1-F2
ccgggccgacactgtcacaaaacaacacatcgggattgccactgtgctgtctccaccagtggcatagaactcggtacatagttcagtaatagcaacagataggtctacatactagtacaaacggtaatacgatggatcaagtgttccgttcgtgatttgcagccgaaatagaatgtccataaccgacaacagcatcgaccgaagattctagatcagaaggacaatgtcatgtctaaggtgctgtccgtgccatatgttctcaatgcaactcgttgtcacctttggaaaactacattgaaagtcggtccaaccaacgtaactgcaatctagacacatcgtgcttaactcgagatgtggaatatcaccttttaggctgcatgactgctgctgtcgttcagcaggatgatgacacacgtagac

SEQ ID NO: 9505 - DNA, 432 bp, Triticum aestivum
  Clone ID: LIB30-001-Q1-E1-F5
aattcgccggccgacaacaacaatgaccctcaatagcttgaggatgctagtgatgaaagacttggcgtgttgcacccaacttcctgatggattatgtcagctcccatggctagagtacctgaaagtcaactgtgctccagcgatcaagtgcattgggccagaatttgtgcgtccccagagccaccgttgctatccttcatcctgcatggtgactgcatttccgaggttgcatgagatggatttattagaattggtggaattggaggaatgggaatgggatgaggaagtgcaagctatgtcagtcatggttgagcttactttcacaagatgtaatttgaagtgtatccctcccggtcttgcctcacatgcaaaggctttgataaagttaaccttgtggagcatgtggcgtctccattcgctagagaactttgc

SEQ ID NO: 9506 - DNA, 380 bp, Triticum aestivum
  Clone ID: LIB30-001-Q1-E1-F8
catcgagtagaccctgttattgtgagaattcttaattcaagagttatagggagggacttatgtcaccacaaacagaaactaaagcaggtgttggatttaaagctggtgttaaagattataaattgacttactacaccccagagtatgaaactaaggatactgatatcttggcagcattccgagtaagtcctcagcctggggttccgcccgaagaagcaggggctgcagtagctgccgaatcttctactggtacatggacaactgtttggactgatggacttaccagtcttgatcgttacaaaggacgatgctatcacatcgagcctgttgctggggaagacagccaatggatctgttatgtagcctatccattagaccta

SEQ ID NO: 9507 - DNA, 447 bp, Triticum aestivum
  Clone ID: LIB30-001-Q1-E1-F9
tacggtcgtatttccgggtcgccccgacgaatcagtagagaatttgaaggcgcttcttgaggtggagactcaagtgccgttgcagcagcagctgcttcatttcaatggcaaggagatgaacaatgctgagaagctcagcgccatcggagtcgatgatggtgatcttgtgatgatggttgcctccaataataggacatctcaggatattatgaggttaaatcctgatggatcggcagtaaatcctcaagctttccaacaacatattcgtggcgattcacaacttatggcgcaactccttcagaatgacccttcattagctcaagccatccttggagatgacaccactgagttgcaaaacatcttgcggtcacaccaccaacaaagactacaactgaaacgcagacaggaagaagagcttgccttattgtatgccgattcatttgatgt

SEQ ID NO: 9508 - DNA, 237 bp, Triticum aestivum
  Clone ID: LIB30-001-Q1-E1-G10
ttcccaggaagatccatcgactttttcggtgctctgcgtgctcgggtgtacgacgacgaggtgcgcaagtgggtgacctctaccggtagcgacaacattggcatgacgcgtgtcaactcgcgggagggactggtgacctttgagcagccaaacatcacactcgggaagctgccagactacgggcacatgcgcatccaggagcaggacaatgtccagcctgtgcagcttgctgacacc

SEQ ID NO: 9509 - DNA, 420 bp, Triticum aestivum
  unsure at all n locations
  Clone ID: LIB30-001-Q1-E1-G11
tacggtcttatcntccgggtcgacaccttcccaggaaaatccatcgactttttcggtgctctgcgtgctcgggtgtacgacgacgaggtgcgcaagtgggtgacctctaccggtatcgagaacattggcaagaagcttgtgaactcgcgggagggaccagtgacctttgagcagccaaagatgacagtcgagaagctgctagagtacgggcacatgctcgtccaggagcaggacaatgtcaagcgtgtgcagcttgctgacacctacatgagccaggcagctctgggtgatgctaaccaggatgcgatgaagactggttccttctacggttagaacattctccatacacactcagcatctcttgctgcatacgaggaggtaaaggggcacagcagagtactttgcctgtgccggcaggat

SEQ ID NO: 9510 - DNA, 289 bp, Triticum aestivum
  Clone ID: LIB30-001-Q1-E1-G12
tgatccgatcaaagtgggtgccctgcctcgagttcagcaacgttggcttcgtcttccgtgagcacgacatctcccccgggtactacgacggccgatactggactatgtggaagctgcctatgtgggggtgcgctgacgccacacaggtgcggaaggaggtggatgaggtcacgagggagtaccccgacgcctatgtccgtgtcctcggcttcgatcgcctgcgcccggtgcagtgcgtccgcttcatgcccttcacgcccctgcgtttgcgacgagtccgggcgtggcc

SEQ ID NO: 9511 - DNA, 376 bp, Triticum aestivum
  Clone ID: LIB30-001-Q1-E1-G2
agtaccagaacggtggctgcggcgggtttggcaaaggcaacttctccgagctgttcaagtccattgaggattatgagaaatcccttgaagccaagcaatctgctgcagttcaggcatcataggatagaagctggaattggagccggagaagctgatccagtgctttttaacatggtctcatggagcacaagaaacaatgttcattgtaatatgcgacgcacaattatatccgatgttataattggtgaagctgaagacagatgtatcctatgtaaaaaacaacgcagcaacgaacattagagaaaaaacgcagaagcgaacagaaaacaaaaaaaaccgaagagattcggtagcaaccaaaaaaaaaaagcggccg

SEQ ID NO: 9512 - DNA, 447 bp, Triticum aestivum
  Clone ID: LIB30-001-Q1-E1-G3
acggtctagtagtccgggccgactttgtgttcaactaggtgctgaaaaagtttatcgagagttttctactattcttcagactgaaggtgaccttgattttgcctccaccatggttcaggcattgaatttgattttgctcacatcgagtgaacttgcggagctgcggtctcttcttaaaaagtcattggtggatacttgtgggaaggacttatttctatctttatacgcttcttggtgccactctccaatggctacaatcagcttgtgcttacttgctcaggcatacaatcatgcgagttctgttattcagtctctgggagaagaagacataaatgtgaagtttctggtgcagctagataaattgatccgtctattagagactccagtatttgcttacttgcgtttacagcttcttgagcctggaaaacacacttggcttctgaaaac

SEQ ID NO: 9513 - DNA, 408 bp, Triticum aestivum
  Clone ID: LIB30-001-Q1-E1-G4
atttttagcaatgagaaacttccagaagtagttgctgaagctgtcaatagatactggtccactctgaagattatctttgatcatcgggcatgggatacacggaccatggagtctctatgccgatcttgcaaatttgctgtaaggacatgtgggaggtccatgggaatcaccattggtgcaatgctgctagaaatccaaacactatatcagcaacacaatcagtcttgcttcctttacttatccagtgaagttattaagatatttggatctgatccatcttgtgcgagttatcttacatgtctgatacagacactctttaatcatacaatacaactgctcagaactattcaagattttacagctagacccgacatagctgatgattgctttctgcttgcgtcaagatgt

SEQ ID NO: 9514 - DNA, 452 bp, Triticum aestivum
  Clone ID: LIB30-001-Q1-E1-G7
gtaccgtactagaattcgccggccgactacctgatcaactccaaatgggtgccttgcctcgagttcagcaaggttgggttcatcttccgtgagcacaacgcatcccctgggtactacgatggccggtactggacaatgtggaagctgcctatgttcgggtgcaccgacgccacacaggtgatcaacgaggtggaagaggtcaagaaggagtaccctgacgcgtacgtccgcatcatcggattcgacaacatgcgccaggtgcagtgcgtcagcttcatcgccttcaagccaccgggctgcgaggagtccggcaaggcctaaacagctcactcaccacgggccacatataaagtgccattgcggttttgtcaactctgacattgctttgggttttccttctccatttatctttcttgtttgttcctaagaatatgtgtatgtccatgttcatg

SEQ ID NO: 9515 - DNA, 466 bp, Triticum aestivum
  Clone ID: LIB30-001-Q1-E1-G9
taccggtcctgagcgtccgggtcgacatgtcgagaaagagaggatcatcaacttcctactgcatgatggtggtccatcaactggggggaaactgggtgtgctcccgattgttggcagcatgggagtcgggaagaccacccttgcgcagcatgtcggcgatgatgagagggtgcgcaaccacttcccaataattttgtattccaatttctcatacaccagagcaatggctcgggatgaggcggtgtttgttcttggatccaaacacacagttggagatgctcaaaaattcatcgagtcactacatgtacttaaggagaaatgcctcaccaagaggttcttgatggtatttgaagatgttgacatgggcaaaaaacagatgctagaagagttactgccaatcttgagacatggcagattcgggagcaggatcataatcaccacagacaacggggatgtcgccagcttg

SEQ ID NO: 9516 - DNA, 148 bp, Triticum aestivum
  Clone ID: LIB30-001-Q1-E1-H11
tccgcccacgcctctgtaccgccgcatatgacgacggaacgcggagaagagatcgctaaacgaatactttgatcatcgtgtgacaacaataacggctgcttcactgatgcgggcgtctgtgacattgagaccagctggtttcacgggt

SEQ ID NO: 9517 - DNA, 368 bp, Triticum aestivum
  Clone ID: LIB30-001-Q1-E1-H12
gagaagacgaaagaaggggagatcaaggagctccgctacagccctgactcggagatccaaacccaggattcctgagctcctcatacctacaaattattaggtcgtgcttttcggcttccttctgtctcggtagctttccccatttattgcaaccttctcaaatctcaagattccaactggtcaaggaagtgaagaacaaggacagaaggacatggatgccttaagttcaatgctcgacaaggcgaaagacaaggtgaaaagcaaccctgatgtgatggagaaagtcagttcggtcctcgacaaggttaagaaccacccagaagtcatggagaaagttgctgaagttttacatctgggaaaacgtgaat

SEQ ID NO: 9518 - DNA, 427 bp, Triticum aestivum
  Clone ID: LIB30-001-Q1-E1-H2
tctcagaacaaaccatcgactttttcggtgctctgcgtgctcgggtgtacgacgacgaggtgcgcaagtgggtgacctctaccggtatcgagaacattggcaagaagctggtgaactcgcgggacggaccagtgacctttgagcagccaaagatgacagtggagaagctgctagagtacgggcacatgctcgtccaggagcatgacaatgtcaagcgtgtgcagcttgctgacacctacatgagccaggcagctctgggtgatgctaaccaggatgcgatgaagactggtaccttctacggttagaacattctccatacacacccaccatctcttgctgcataggaggaggtaaaggggcacagcaaggtactttgcctgtaccggcaggatgcaccgaccagactgccaagaacttcgacccaacg

SEQ ID NO: 9519 - DNA, 438 bp, Triticum aestivum
  Clone ID: LIB30-001-Q1-E1-H3
tcccgggccgactacctgatccactcaaagtgggtgccctgcctcgagttcagcaaggttggcttcgtcttccgtgagcacaacagctcccccgggtactacgacggtcgatactggacaatgtggaagctgcccatgtttgggtgcaccgacgccacacaggtgctcaacgaggtggaggaggtcaagaaggagtaccctgacgcctatgtccgtgtcatcggcttcgacaacctgcgccaggtgcagtgcgtcagcttcatcgccttcaggccaccgggttgcgaggagtccggcaaggcctaaactacgagttgaaacaatggcctatctcgtatgaaggccttttgtgaacttcacttttgtccacaactctgctgcacgactctgctttcggaccggagcataccttttgttctatatgatttgtgtatgtat

SEQ ID NO: 9520 - DNA, 367 bp, Triticum aestivum
  Clone ID: LIB30-001-Q1-E1-H4
catcgagtagaccctgttattgtgagaattcttaattcaagagttatagggagggacttatgtcaccacagagagaaactaaagcacgtgttggatttaaagctggtgttaaagattataaattgacttactacaccccagagtatgaaactaaggatactgatatcttggcagcattccgagtaagtcctcagcctggggttccgcccgaggaagcaagggctgcagtagctgccgaatcttctactggtacatggacaactgtttggactgatggacttaccagtcttgatcgttacaaaggacgatgctatcacatcgagcctgtttctggggaagacagccaatggatctgtaatgtagctta

SEQ ID NO: 9521 - DNA, 438 bp, Triticum aestivum
  Clone ID: LIB30-002-Q1-E1-A3
ccgggccgactacctgatccactcaaagtgggtgccttgcctcgagttcagcaaggttgggtttatcttccgtgagcacaacgcatcccctgggtactacgatggccggtactggacaatgtggaagctgcctatgttcgggtgcaccgacgccacgcaggtaatcaacgaggtggaggaggtcaagaaggagtaccctgacgcgtatgtccgcatcatcggattcgacaacatgcgccaggtgcagtgcgtcagcttcatcgccttcaagccaccgggctgcgaggagtccggcaaggcctaaacagctcactcaccacgggccacatataaagtgccattgcggttttgtcaactctgacattgctttgggttttccttttccatttatctttcttgtttgttcctaagataagaatatgtgtatgtccatgttac

SEQ ID NO: 9522 - DNA, 424 bp, Triticum aestivum
  Clone ID: LIB30-002-Q1-E1-A4
ccgggccgactacctgatccaactccaagtgggtgccttgcctcgagttcagcaaggttgggttcatcttccgtgagcacaacgcatcccctgggtgctatgatggccggtactggacaatgtggaagctgcctatgttcgggtgcaccgacgccacacaagtgatcaacgaggtggaggaggtcaagaaggagtaccctgacgcgtatgtccgcatcatcggattcgacaacatgcgccaggtgcagtgcgtcagcttcatcgccttcaagccaccgggctgcgaggagtccggcaaggcctaaacagctcactcacgacaggccatatataaagtgccattgcagttttgtcaactctgacattgctttgggttttccctctccatttaactttcttatttggtcctaagaatatgtgtatg

SEQ ID NO: 9523 - DNA, 207 bp, Triticum aestivum
  Clone ID: LIB30-002-Q1-E1-A5
acctcatcagtcacatgcacagcaccaagtaaatgagaggcatacaggggagagtggtttgccccagaggagtgttcaaagcctcttcttctgagaataaatttttgtatggaactatgtcagctaaaaaccttttattggatgtatcctgatggttggttgggcttagcggctcacattttggtggtattatgtacttgcttgaac

SEQ ID NO: 9524 - DNA, 374 bp, Triticum aestivum
  Clone ID: LIB30-002-Q1-E1-A7
ccgaccaccaaaatgattgtgaagcctgacatgctgttcgggaagcgtgggaagagtggccttgtggtactcaacctggatgtagcccaagtcaaggagtttgtgaaggagcggttgggagtcgaggtcgagatgggtggctgcaaagctccaattaccaccttcatagttgagccgtttgtcccccacgatcaagagtactacctttcagttgtgtccgaaaggttgggtagcaccattagcttctcggaatgtggaggcattgaaatcgaggagaactgggacaaggttaagacagtctttcttccgactgagaagccaatgacacctgatgcttgtgctcccttgattgcaacccttccactggacgcacg

SEQ ID NO: 9525 - DNA, 247 bp, Triticum aestivum
  Clone ID: LIB30-002-Q1-E1-A8
tcaccaaggtcgggttcatcgtccgtgagcacaattcatcccctgggctgcttcatggtcggtactggagaatgtgtgacctgcgtaagttcgggtgcaccgacgcaaaacaacttatcaacaacgtggatgaggtcaagaaggagtaccccgatgcgtatgtccacatcatccgcttccacaacatgcgccaggtgcagtgcgtcagcttcagcaccttcatcccaccgggttgcgacgagtccgg

SEQ ID NO: 9526 - DNA, 426 bp, Triticum aestivum
  Clone ID: LIB30-002-Q1-E1-A9
cgggccgactcgcagggcatctgcatgaacataaacgggtgggagaatatgatcttcattggcatcaacgctgctatcagtgttcgagtctccaatgagctgggcgcaggccgtccaatggcagccatgcacgctgtcatcgtcatcattgccgagtcgctgctcatcgggctgctatgcatggtcctcgtcttgatcttcagagataacttcgccatcatctacagcaccgatttggagctccagcatgccgtctccaagatcgccggactccttggcttgaccatggtgctcaacagcgtgcagcctgtggtttcaggggttgctgttggacgacgatggcaaggccttgttgcatacatcaacctaagctgctactacgttctcggattgcccttgcgctaccttctcggctacaagttcaac

SEQ ID NO: 9527 - DNA, 374 bp, Triticum aestivum
  Clone ID: LIB30-002-Q1-E1-B1
tccgggtcgacggctacagccacatctacacgccagaggaatggtctgaatctggtgaccgctacgccggcggaacgaccgggcttcttatctgggccgtcaccctcgccggcctcctcggcgacggcgtcctcctcgtctacaacaccagcgctctcgccggctaagagagcatctacgtgtaacacagggccgggtctctgcttgcatgcacgtctctgtaatctacatagctacctcctgtgaatgtatgcaatcaacgatgcagagtaattgatccgaacagatggtttatgtgtatgtacgtaacgctgtaaccatatacttcctactttggaaactgtaaaaagggtggattcttggagccccgtaaa

SEQ ID NO: 9528 - DNA, 433 bp, Triticum aestivum
  Clone ID: LIB30-002-Q1-E1-B10
atgcccgggccgacggttgaaacgccggcgtacatcgccccggaggtgttctcccgccgggaatacgacggcaagacagccgatgtgtggtcttgtggagtgaccctttatgtgatgctagtcggtggttaccctttcgaggatcctgatgaccccaagaacttcagaaagaccattgggagaataatgtcaatccaatacaaaataccagagtacgtccatgtatcccaagactgcaagcaactccttgccagtattttcgtcgcaaaccctgcaaagagaataacaatgagggagatcaggaaccacccctggttcttgaagaacttgccaagagagctcacggaagctgcccaagcaatgtactacaagagagacaacagcgccccgacctactcggtccagtccgtggaggagatcatgaagatcgtgg

SEQ ID NO: 9529 - DNA, 409 bp, Triticum aestivum
  Clone ID: LIB30-002-Q1-E1-B11
cccgggccgacaccttcccaagacaatccatcgactttttcggtgctctgcgtgctcgggtgtacgacgacgaggtgcgcaagtgggtgacctctaccggtatcgagaacattggcaagaggctggtgaactcgcgggacggacccgtgacctttgagcagccaaagatgacagtggagaagctgctagagtacgggcacatgtttgtccaggaccaggacaatgtcaagcgtgtgcagcttgctgacacctacatgagccacgcagctctgggtgatgctaaccaggatgcgatgaagactggttccttctacggttagaacattctccatacacacccaccaactcttgctgcatacgaggaggtaaatgcgcacagcaatgtaccttgcctgtatcggcaggatgc

SEQ ID NO: 9530 - DNA, 404 bp, Triticum aestivum
  unsure at all n locations
  Clone ID: LIB30-002-Q1-E1-B12
ggcgtccagacacaatcttaccggcgacgcctcgcgacctcctcagctcctctcccccttcgccgccgctgccaccacggggacccgctctgatcccgtcagttgtagaagtaactgattagcctgatggctatggtcgatgagcctctctatccaattgccgtgctgatagatgagcttaaaaatgaagatattcaattgcgcctgaactccatcagaagactttccactattgcacgggcacttggagaagaaagaaccaggaaggaactgattcctttcctcagcgaaaacaatgatgatgaagatgaggtgcttcttgcaatggctgaagaattgggtgtgttcattccttatgttgggggtgtagagcatgctcatgttttgctcncaccattggagac

SEQ ID NO: 9531 - DNA, 442 bp, Triticum aestivum
  unsure at all n locations
  Clone ID: LIB30-002-Q1-E1-B3
gggccgacaccttcccagaacaatccatcgactttttcggtgctctgcgtgctcgggtgtacgacgacgaggtgcgcaagtgggtgacctctaccggtatcgagaacattggcaagaagctggtgaactcgcgggacggaccagtgacctttgagcagccaaagatgacagtggagaagctgctagagtacgggcacatgctcgtccaggagcaggacaatgtcaagcgtgtgcagcttgctgacacctacatgagccaggcagctctgggtgatgctaaccaggatgcgatgaagactggtaccttctacggttagaacattctccatacacacccaccatctcttgctgcataggangaggtaaaggggcacagcaaggtactttgcctgtaccggcacgatgcancgaccagactgccaagaacttcgacccaacggcg

SEQ ID NO: 9532 - DNA, 445 bp, Triticum aestivum
  unsure at all n locations
  Clone ID: LIB30-002-Q1-E1-B4
ccgggtcgacaccttcccagaacaatccatcgactttttcggtgctctgcgtgctcgggtgtacgacgacgaggtgcgcaagtgggtgacctctaccggtatcgagaacattggcaagaggctggtgaactcgcgggacggacccgtgacctttgagcagccaaagatgacagtggagaagctgctagagtacgggcacatgcttgtccaggagcaggacaatgtcaagcgtgtgcagcttgctgacacctacatgagccaggcagctctgggtgatgctaaccaggatgcgatgaagactggttccttctacggttagaacattctccatacacacccaccatctcttgctgcataggaggaggtaaaggggcacagcaatgtactttgcctgtnacggcaggatgcaccgaccagactgccaagaacttcgacccaacggcga

SEQ ID NO: 9533 - DNA, 451 bp, Triticum aestivum
  Clone ID: LIB30-002-Q1-E1-B6
attcgccggtcgacgaccctcatcagactcgtcgcttcacaggcttgtggtcagcttgactgatatcaaacaatggcggaacacttggcttcgatatttggtacagagaaagacagggtcaactgtccattttacttcaagattggagcttgtcgtcatggcgatcgctgctctcgcatccataacaggccaaccatatcacctactattgtgctcatgaacatgtatcagcgccctgatatgattacccctggggttgatgctcaaggccagccgatagatcctcgcaagatgcaggagcattttgaagatttttatgaggatatctttgaggaactgagcaagtttggtgagattgagaccctcaacgtctgtgacaacctttctgatcacatgataggcaatgtgtatgtccagttcagagaggaagatcaggcagcagcagctcata

SEQ ID NO: 9534 - DNA, 295 bp, Triticum aestivum
  Clone ID: LIB30-002-Q1-E1-B7
gggcgtatctagggtttttttacctccgcgctccgcctgcccacacacggttccgtccagaagcttctagacacttccagtcggaggaggagctcacgccgcagcagcagccatggcgtccaccaaagtccagcgtatcatgacccagcccatcaacctcatctttcggttcctcagagcaaagcgcgcatccagatctggcttttcgggcagaaggatatgcggatcgagggtcgtatcatcggctttgatgagtacatgaacctggttctcgaggatgctgaggaaatcaaca

SEQ ID NO: 9535 - DNA, 412 bp, Triticum aestivum
  Clone ID: LIB30-002-Q1-E1-B9
cccgggccgactatgtacagacacagagagcgcgaggtacgctgatcagggaggtccaggagagcttcacggttgacgcgttcatcggcaacgcgaccgactgggagctcgtttgtctgggaaacctcgtggggttgcccatcgtcgtggtgcctacgggcttcaagagcatcgaacacccaccaaaaggcaacacgaggagacgaaccacagtgacgacgggcatatatgctccccctgaccatgaccacattgctctagcgttggcgatggcgtatcagtccgtcaccgatcaccacaatcaacggccaccgattgacgcaaactacaacatacacaagtgattagccggctgatgaaatggtattgacactgacactccgtgtgctgtttcacttgagacaatgaaata

SEQ ID NO: 9536 - DNA, 349 bp, Triticum aestivum
  Clone ID: LIB30-002-Q1-E1-C1
ggatctaacacaaccatcatatccatatccagcccaacaaatggcgcctctcaaggtgactgttgccatgtgtgtcgtgctggtcctgatgatccagctgcaggcgccggcggctgcgcaggagataccatgcgaccagtgcgggccgggatgcgcccaggcgtgcaatgcgcagggcccctacttctgcaacagcttctgcaacatctttcccaccctgtgcaactactgcttcctcatccaatccggcttgtgcattcgcgagtgcgcaaacctctgcagggtcaactgcgagttgatgaccatgcacgaacgcatcgacatgcatggattccagggtgtccatgag

SEQ ID NO: 9537 - DNA, 435 bp, Triticum aestivum
  Clone ID: LIB30-002-Q1-E1-C11
aattcccgggccgacatcgaaccaaatgcgcatgtcaagcaggcgatgaatgagatcaatgcaggttatttgctaaaggccttatgtgatgaaagttggacgcttgtacttaaatctggcctccatcatactactgacatgatacttgtgccttttgcagctgcaaggatgagggtggctgcaaacgagaaggcggaggctgagaagattgtccagatcaagcgtgccgagggtgaagcagaggccaagtacctgtctggcctcggtatcgcccgccagcgccaggccattgtggatggcctgagggacagcgtcatgggcttctcagtcaatgtgcctggcaccactgcaaaggacgtgatggacatggtgctgatcacccagtactttgatactatgaaagagattggcgcgtcatccatgtcctctgcggtg

SEQ ID NO: 9538 - DNA, 447 bp, Triticum aestivum
  Clone ID: LIB30-002-Q1-E1-C3
ccgggccgaccaccactggcaatatgatctacaagcttggaggtattgacaagcgtgtgatcgagaggttcgagaaggaagccgctgagatgaacaagcggtcgttcaagtacgcctgggtgcttgacaagctgaaggccgagcgtgagaggggtatcaccattgatattgccctgtggaagttcgagaccaccaagtactactgcaccgtcattgatgcccctggtcaccgtgacttcatcaagaacatgattactggtacctcccaggctgactgtgctgtgctcatcattgactccaccactggtggttttgaggctggtatctccaaggatggccagacccgtgagcacgccctccttgctttcactcttggagtgaagcagatgatctgctgctgcaacaagatggatgccaccactcctaagtactcgagggctcgttatg

SEQ ID NO: 9539 - DNA, 339 bp, Triticum aestivum
  Clone ID: LIB30-002-Q1-E1-C4
cgggtcgacaataatttgtatgcaccaccaagagagacgactggacagaagtggaacatccagcacccaagacgtgtcgtgtattgttgtgaggtgatattgtaactgtaagctagatactacacaagagtcggtccggtccctctgtcgctagggcaatagcgtcgctttgtcttgttttacccaacaaaggatgtttctatatgatgtacaagatacacacacattgctggtgctgttgctgttgtggaagtgaaggacctgctgttcgtcgccgtgccaagttgggttaaaaagggtcaaagttgttgggtttgtcacgcaacctgaatgtttggt

SEQ ID NO: 9540 - DNA, 344 bp, Triticum aestivum
  Clone ID: LIB30-002-Q1-E1-C5
attcccgggccgacctgaaggcaaacaaaaaaaagatcaaggctgccgtgaaaaagatgtacgacatccaggccaagaaggttaacaccctgatcaggcctgatggcaagaagaaggcgtacgtgaagctgacaccagactatgatgctcttgacgtggccaacaagatcggcatcatataagtcagagggacggtcctgcagtaggcgcttgtgtcgtggtttcttatgttattggagttttgtagttgttacttagcaaaggggctcagtggctccattgcctaccatatcgccgcgcactttcatgaatttgatgcaatcgaagtgacttgtgttgatgcc

SEQ ID NO: 9541 - DNA, 354 bp, Triticum aestivum
  Clone ID: LIB30-002-Q1-E1-C6
gactcttcacatgatcctcaggctcaggggcggtactatgatcaaggttaagactctcactgggaaggagatcgaaatcgacattgagcccaccgacacgattgataggatcaaggagcgtgttgaggagaaagaaggcattcctcctgtgcagcaaaggctgatttatgctggtaagcagcttgcagatgacaagactgccaaggactacaacatcgaaggtggctcggtcctccatcttgtccttgctctgaggggtggttactagttaagctgtaatggaaacgcttgcgtcctgagagaagtgaccattggtggcatggaacctgtgttgcaaagaaataataacaaact

SEQ ID NO: 9542 - DNA, 331 bp, Triticum aestivum
  Clone ID: LIB30-002-Q1-E1-C7
acggctacaaccagatctacacgccagaggaatggtctgaatctggtgaccgctacgccggcggaacgaccgggcttcttatctgggccgtcaccctcgccggcctcctcggcggcggcgtcctcctcgtctacaacaccagcgctctcgccggctaagagagcatctacgtgtaacacagggccgggtctctgcttgcatgcacgtctctgtaatctacatagctacctcctgtgaatgtatgcagtcaacgatgcaaagtaattgatccgaacagatgggttatgtgtatgtacgtaacgctgtgacgatatccctcctactttggaaa

SEQ ID NO: 9543 - DNA, 334 bp, Triticum aestivum
  Clone ID: LIB30-002-Q1-E1-C8
acagcgggaggtagatctggtgatagctcccctaataagctcgaatctttccctgatctggaggatctccgtcgccttgttccatttgttcgtcgctgtcgtggagatggggacagaaagtggaagaggtggagcgcaagtttgtttcgattgggtttgtgcatattctcatcggtgcttggagtggagctacggcgcccactggagctgccggtctccgacgcctccccggtgacctttctggccgaaaggcggcctggtgaagccgcttcgtttcttcctcctggcttgattccatttgagatgcggctgttcaacttcaacatggagtcct

SEQ ID NO: 9544 - DNA, 317 bp, Triticum aestivum
  Clone ID: LIB30-002-Q1-E1-C9
catctagtagaccctgttattgtgagaattcttaattcaagagttatagggagggacttatgtcaccacaaacataaactacagcacgtgttggatttaaagctggtgttaaagattataaattgacttactacacgcccatagtatgaaactaaggagaccgatatcttggcagcattccgagtaagtcctcaacctggggttccgccctaataaccacgggctgcactacctgccgaatcttctaatggtccattgacaactgtttggacttattgacttaccactcatgatcgtcacaaaggacaatgctatca

SEQ ID NO: 9545 - DNA, 376 bp, Triticum aestivum
  Clone ID: LIB30-002-Q1-E1-D1
acggtctagctatcccgggtcgacgtgcgcacgatgggtctgggattgggagcgccgttcttcctcctcgtccttctcttgctggccgccggctctggagctatgccgcaggacaagaggattcacaggaattatgttcttctcgatctcgatacaattgagatccgcccaaatggcaaggaggaaattagttctagcaaaattcatgtctctgttgagagtggcagcacaatatgctcaacttgcgagaacttgacaaataaagctgtcagttatcttagtgagaaacaaacacaagatgagatcatggagattcttcatggtgcctgttctcagacattctccttagaacagaagtgtcctgagatggtggact

SEQ ID NO: 9546 - DNA, 375 bp, Triticum aestivum
  Clone ID: LIB30-002-Q1-E1-D11
atgcccgggccgacgagatttacaaggttgcatcaatcgcgctgagtccaaatgttcctgggcagatctttatggggcttatggtgaaccctcctaaacctggagacatctcgtacctgaagtactctgctgaaagtaagtctatccttgaatctttaaggaggagggcacaaataatgacagacggtttcaatagttgccgaaatgttgtctgcaatttcacagaaggagctatgtattctttcccgcaaatacggctgccgcagagagctatggatgtagcacagagcgctggcagaacgcacgatgtttactactgcctcaggcttctggaatctactggaatttacactgttccaagctcaagttttggtc

SEQ ID NO: 9547 - DNA, 398 bp, Triticum aestivum
  unsure at all n locations
  Clone ID: LIB30-002-Q1-E1-D12
caccatgtagagcctccatgaagaactccggtaataaaagaatgatagaaaggaagggaagttgaaagaacaaggtgatccttgcaatgatttagatgaagctttggaatgatataattgaaataacttggagctccggaaagaaaagatgaacaacttggaaccgagaatttgatatcatgaacgaactccgaaagaaggaataaatcacttggaggaaacaagaataagaattatgttatgcgtatccttcaccgatataaattgatgacaagcaacggatttttgcatactacttattctcgtagaaaggattaagatagatattgcgcaaacttgggaaggtcttcatcgaaccacgggtaggattganacaacgaataaattgatatgataac

SEQ ID NO: 9548 - DNA, 389 bp, Triticum aestivum
  Clone ID: LIB30-002-Q1-E1-D2
ccgggtcgacccgggtcaatcacaagcacaccgcgtggtatcattccccgtccccacattccgattccatgtggccgcggactatttcgatgcccaccgccgccacgcggtgtcggtgcacctccccctcacccggacaatggagggcagccttgatgcatgcaagctagctaattcttccacgtacggccaaagtcaactatatatattcgcaataatatgcgctcgatcgggtacttgataataaaacttgagtatggccctgctctcatgtgggtgtgtacttaaatttttgtttggaactttgggtgtgaacttaattagttacaacgtgttatcaataaaactgcttccgttccaaatcataataaaaaatactcctttttcac

SEQ ID NO: 9549 - DNA, 256 bp, Triticum aestivum
  Clone ID: LIB30-002-Q1-E1-D3
acggtctagctatccgggtcgacaagtatgacaatggagcgggctttggacattttgccatcacacatgaggatgtgtacaagctggctgagacaattaaatcatcttcatgttgtaagatcactcgtgaacctggtcctgtcaagggagggtccactgtgattgcttttgcaacagacccagatgggtacatggtcgaacttaaccagaagggtccgaagcctgagcctctctgtcaagttatgcctcctgttgg

SEQ ID NO: 9550 - DNA, 403 bp, Triticum aestivum
  Clone ID: LIB30-002-Q1-E1-D4
cggtccagctatcccgggtcgactacctgatccactcacaagtgggtgccttgcctcgagttcagcaaggttgggttcatcttccgtgagcacaacgcatcccctgggtactatgatggccggtactggacaatgtggaagctgcctatgttcgggtgcaccgacgccacacaagtgatcaacgaggtggaggaggtcaagaaggagtaccctgacgcgtatgtccgcatcatcggattcgacaacatgcgccaggtgcagtgcgtcagcttcatcgccttcaagccaccgggctgcgaggagtccggcaaggcctaaacagctcactcacgacaggccatatataaagtgccattgcagttttgtcaactctgacattgctttgggttttccttctccattt

SEQ ID NO: 9551 - DNA, 100 bp, Triticum aestivum
  Clone ID: LIB30-002-Q1-E1-D5
acagcatgatcgtcttgacatagacttcacattcggcatctgatatgttatcgggaatgtcctacggtactgcgccttgctcatcattgcacagcttaat

SEQ ID NO: 9552 - DNA, 437 bp, Triticum aestivum
  Clone ID: LIB30-002-Q1-E1-D7
gacgcgagaagacaccagaaggggatcgtctctcgtctcgtcgaggaatcaacaaccatgggcggtggcaacgcgcagaagtccaagatggcgagggagaggaacctcgagaagctgaagggcggcaaggggagccagctcgaggccaacaagaaggccatgaacatccagtgcaagatatgcatgcagactttcatctgcaccacctctgaagcaaagtgcaaggagcacgccgaggcgaagcatccgaagagcgacctcgtccagtgcttcccccacctcaagccgtgatatctgccagatcggacggagagagagagaagctgccgtaatccagctagtattatcatgttccgcaatgactggttgttgacctaagcatgggtctgaactccggtgtgctgctgtcccagctgccttggttgtgtgcccatcta

SEQ ID NO: 9553 - DNA, 425 bp, Triticum aestivum
  unsure at all n locations
  Clone ID: LIB30-002-Q1-E1-D8
ttcgcgggccgacaccttcacagaacaatccatcgactttttcggtgctctgcgtgctcgggtgtacgacgacgaggtgcgcaagtgggtgacctctaccggtatcgagaacattggcaagaagcttgtgaactcgcgggacggaccagtgacctttgagcagccaaagatgacagtcgangaagctgctagagtacgggcacatgctcgtccaggagcaggacaatgtcaagcgtgtgcagcttgctgacacctacatgagccaggcagctctgggtgatgctaaccatgatgcgatgaagactggttccatctacggttagaacattctccatacacactcaccatctcttgctgcatacgatgatgtaaatgggcacatcatggtaatttgcctgtgccgggacgatgcaccgaccagactg

SEQ ID NO: 9554 - DNA, 423 bp, Triticum aestivum
  Clone ID: LIB30-002-Q1-E1-D9
attcccgggctgacctgagagtcaacaaggggaaggttcttctcattgttaacgtcgcttcgcagtgtggcttgaccaactccaactacaccgagctgagccagctgtacccgaagtacaaggaccaaggctttgagatcttggctttcccatgcaatcagtttggtgggcaggagcctggcaccaatgatgagatcgttcagtttgcctgcactcgcttcaatgccgagtaccccattttcgacaacgttgatgtcaatggcaacaatgtttctccccgatacaagttcctgaagtctagcaaaggtggccttttcggcgacagcatcaagtggaacttctccaagttcttggttgacaacgagggtcgcgctgtagaccgctatgcaccgaacactatcccacctgagcattgacaatgat

SEQ ID NO: 9555 - DNA, 337 bp, Triticum aestivum
  Clone ID: LIB30-002-Q1-E1-E1
catctagtagaccctgttattgtgagaattcttaattcaagagttatagggagggacttatgtcaccacaaacagaaactaaagcatgtgttggatttaaagctggtgttaaagattataaattgacttacgacaccccatagtatgaaactaaggatactgatatcttggcaccattccgagtaagtcctcagcctggggttccgcccgatgaatcatgtgctgcaataactgccgaatcttctactggtacatggacaactgtttggactgattgacttaccagtcttgatcgttttaaaggacgatgctatcacatcgagccttgttgctgggg

SEQ ID NO: 9556 - DNA, 365 bp, Triticum aestivum
  Clone ID: LIB30-002-Q1-E1-E2
ccgggccgacttttccactaacaaacccaaaatacccaactctgccttacgtaaagttgccagagtacgattaacctctggatttgaaatcagtgcttatatacctggtattggccataatttacaagaacattctgtggtattagtaatatgaggaagggtttcggatttacccggtgtgagatatcgcattattcgaggaaccctagatgctgtcgcagtaaagaatcgtcaacacgggcgttctaaatatggggtcagcacgccaaaccaataagtgattttagcccttatcaaaagaaaacggattcttgaacctctttcacgctcatgtcacgtcaaggtactgcagacaaaagaactgc

SEQ ID NO: 9557 - DNA, 437 bp, Triticum aestivum
  Clone ID: LIB30-002-Q1-E1-E3
gggtcgacaccttcccagaacaatccatcgactttttcggtgctctgcgtgctcgggtgtacgacgacgaggtgcgcaagtgggtgacctctaccggtatcgagaacattggcaagaagcttgtgaactcgcgggacggaccagtgacctttgagcagccaaagatgacagtcgagaagctgctagagtacgggcacatgctcgtccaggagcaggacaatgtcaagcgtgtgcagcttgctgacacctacatgagccaggcagctctgggtgatgctaaccaggatgcgatgaagactggttccttctacggtaaaggggcacagcaaggtactttgcctgtgccgggatgatgcaccgaccagactgccaagaacttcgacccaacggcgatgagtgacgacggcagctgcctttacaccttttaagcatgcaaa

SEQ ID NO: 9558 - DNA, 414 bp, Triticum aestivum
  Clone ID: LIB30-002-Q1-E1-E4
gcataaattgttcgtacagatattttcactgattgatgttcagctatttaacaggctccttttgcggcgtgagtgctgttcatttagcaacggggaatatgtcaaagctggactagctgagctaaaacactggtctgacaatgctactcgagagtttgcaggttcggcctgggaggcattgaagcatatcagacaggctgttgatttcttggtgatttctcttaagccaatgagaacactaagagagatacgtgctgatgtgtgccaagccctcagcatacagcagctagagcgcatagttggtatgttactggatgacgtcaatggttcagacactatttcagcagagttcgcatcaagcttgagagctgcaacgcgtgaggaagcacatactggtcacaactttctctatac

SEQ ID NO: 9559 - DNA, 211 bp, Triticum aestivum
  Clone ID: LIB30-002-Q1-E1-E6
cgtagcaagcgaagaaatgcttcggggaatttaaaataagcataaattcggaaaatcccaaataaggtcaccctttaaactgcctgcttgaatcaataacaaggcagaaaacacctggccaaactgaaacatcttagtacccaaaggaaaaaaaaaaacaaaaaaaaaaaaaaaaagcgggcgccccaaaagatataagcctatatatacc

SEQ ID NO: 9560 - DNA, 364 bp, Triticum aestivum
  Clone ID: LIB30-002-Q1-E1-E7
attcgcgggccgacatggtgctcaatgactactgcatgcccgagatgaccggctacgacctcctcaaggccatcaaggccatgagtcctctcaagcctatcccggtggtcgtcatgtcgtcggagaacgagccccagaggatcagcagatgcctcaaggctggtgctgaagattacatcgtcaagcctcttcagagcaaggatgtgccgcgcctgaggagctgctcgaacgcgaaacccaaggaccctccatgcagcactgtgagcaagagcgcggaccatatagctgctgtcgatggcacgtcgtcgtcgctgccacggcgagcacacctcaccgatattgccatggtcctccactcgtcgag

SEQ ID NO: 9561 - DNA, 397 bp, Triticum aestivum
  Clone ID: LIB30-002-Q1-E1-E9
ttcccgggccgactatgtacagacacatagagcgcgaggtaggctgatcagggaggtccaggagagcttcacggttgacgcgttcatcggcaacgcgaccgactgggagctcgtttgtctgggaaacctcgtggggttgcccatcgtcgtggtgcctacgggcttcaagagcatcgaacacccaccaataggcaacacgaggagacgaaccacagtgacgacgggcatatatgctccccctgaccatgaccacattgctctagcgttggcgatggcgtaccagtccgtcaccgatcaccacaaacaacggccaccgattgacgcaaactagaaaatacacaagtgattagccggctgatgaaatggtattgagaagaaaactccgtgtgctgtttcc

SEQ ID NO: 9562 - DNA, 287 bp, Triticum aestivum
  Clone ID: LIB30-002-Q1-E1-F1
aatatgagacgaagacttaatcttgatatacctcagaagaatacattcctgttacgacaacatggattggccgctacggatcacttgactgggagtgaaatttggaacgggtatacttgacgatgaggatatcaatcacttgaaagatagaggtaatcattcggttgccgatccgttacaagatcaagtcggattggctcttgggcgttgtacaacatgcagttcagaagaccatttgtacagtactcatacgtcaatcgaagacgactccccaaacgttggtaact

SEQ ID NO: 9563 - DNA, 271 bp, Triticum aestivum
  Clone ID: LIB30-002-Q1-E1-F10
aattcccgggccgacaagattatcaacagaggtgggaaccaaaccgtcgaagctcgttgatggctcctacagtgttcggcagcgagtgagtcttctgtatgtatctacatatcacaccaaaaggttaccgaataagatgtgtgattggctttcgccgtgtacccataccagcatcgatcctgtatcacttgtgtggtagtttgcacaaaacctgcttgaaaatgtttcatggaaacttctttgcctggcgatgatgcctgtattgaataag

SEQ ID NO: 9564 - DNA, 442 bp, Triticum aestivum
  Clone ID: LIB30-002-Q1-E1-F2
gggtcgactgggttccgaagctaacccgtatggtgtttgagttttggatgtctttcaaagaaccgccactgtcatttggctatgtcccattgcttgatgttctgagtgtttcaaatgttggtcttagttggcatgaaatggtcaagttaagtacatttcttcatgagacctctgttcgagacctgaggttggggtttaaatgcgaaaagatttgggttcaaccagagtgtctgaccaaaaggctggcatctgtgttccaccaactaaggattgtcaatctagttgacattcctgaagggtatgatctcacctggacaatgttcattttggaagcggtgccgtccctagaggagttctacatgacggtaatggaccatccttgtgaaatgcaatggatcacgagaaaaggagggcaagttgtatatcgacgacaaaggtgtga

SEQ ID NO: 9565 - DNA, 375 bp, Triticum aestivum
  Clone ID: LIB30-002-Q1-E1-F4
tacctgatccactacaagtgggtgccttgcctcgagttcagcaaggttgggttcatcttccgtgagcacaacgcatctcctgggtactacgatggccggtattggacaatgtggaagctgcctatgttcgggtgcactgacgccacacaggtgatcaacgaggtggaggaggtcaagaaggagtaccctgacgcgtatgtccgcatcatcggattcgacaacatgcgtcaggtgcagtgcgtcagcttcatcgccttcaagccaccgggctgcgaggagtccggcaaggcctaaacagctcactcacgacaggccatatataaagtcccattgcagttttgtcaactctgacattgccttggggttttcccttct

SEQ ID NO: 9566 - DNA, 413 bp, Triticum aestivum
  Clone ID: LIB30-002-Q1-E1-F5
catcgagtagaccctgttattgtgagaattcttaattcaagagttatagggagggacttatgtcaccacaaacagaaactaaagcaggtgttggatttaaagctggtgttaaagattataaattgacttactacaccccagagtatgaaactaaggatactgatatcttggcagcattccgagtaagtcctcagcctggggttccgcccgaagaagcaggggctgcagtagctgccgaatcttctactggtacatggacaactgtttggactgatggacttaccagtcttgatcgttacaaaggacgatgctatcacatcgagcctgttgcctgggacgacagccaatggatctggtaggtagcttatccattagacctatttgaagagggttccgttactaacatgtttact

SEQ ID NO: 9567 - DNA, 450 bp, Triticum aestivum
  Clone ID: LIB30-002-Q1-E1-F6
aattcgcgggccgaccggctgaagaagacagaaggggcagggctggaagttctgcgcattataaatgagccaactgctgcatctcttgcttatggttttgagaagaaaaacaatgaaacgattctagtgtttgacttgggtggcggtacttttgatgtctctgtattggaggttggagatggtgtatttgaggtgctttccacatctggggacacacacttaggtggagatgactttgataagaaaattgtagattggcttgctagcaccttcaagaatgatgaaggcatcgatcttcttaaggataaacaagcccttcagcgtcttactgaggcagcagaaaaagctaagatggaattgtcaacgctcacacaggcgaacattagcttgccattcataactgctactgctgatgggcccaaacacattgaggcaaccctctctagagct

SEQ ID NO: 9568 - DNA, 445 bp, Triticum aestivum
  Clone ID: LIB30-002-Q1-E1-F7
attcgccggccgacaccttcacagaacaatccatcgactttttcggtgctctgcgtgctcgggtgtacgacgacgaggtgcgcaagtgggtgacctctaccggtatcgagaacattggcaagaagctggtgaacgcgcgggacggaccagtgacctttgagcagccaaagatgacagtggagaagctgctagagtacgggcacatgctcgtccaggagcaggacaatgtcaagcgtgtgcagcttgctgacacctacatgagccaggcagctctgggtgatgctaaccacgatgcgatgaagactggtaccttctacggttagaacattctccatacacacccaccatctcttgctgcatatgacgacgtaaaggggcacagcaacgtactttgcctgtactgggatgatgcaccgaccagactggcaagaacttcgacccaacg

SEQ ID NO: 9569 - DNA, 442 bp, Triticum aestivum
  Clone ID: LIB30-002-Q1-E1-F8
acatcgagacggatgcgcatgtcaagcaggcgatgaatgagatcaatgcagctgcaaggatgagggtggctgcaaacgagaaggcggaggctgagaagattgtccagatcaagcgtgccgagggtgaagcagaggccaagtacctgtctggcctcggtatcgcccgccagcgccaggccattgtggatggcctgagggacagcgtcctgggcttctcagtcaacgtgcctggcaccactgcaaaggatgtgatggacatggtgctgatcacccagtactttgatactatgaaagagatcggcgcatcctccaagtcctcggcggtgttcatcccccatggccctggtgcggtgcgcgacatcgccacgcagatccgccatggtcttcttcaaggccagtctgcctctgacaactagcagttggctttgccggcatgaacttt

SEQ ID NO: 9570 - DNA, 439 bp, Triticum aestivum
  Clone ID: LIB30-002-Q1-E1-G1
cgggtcgacctactcctttaaggatgggagatggtcatggggacgattgtatggcgtccagataggctctcccacaaagagccgcattgccttgatgtagttgtcactatccaatgtaaagcggtgatacattcctgcaggcaaaacaatcatgccacctttcttaactgctatacggatccactgttcgttttggtccctcacatcaaagtatccactgccctcgagacaatagcgtatctcttcatcagtatgcaagtgctcttcaaagaagttcttcagcttggcctcatagtttggcaacttctctggacatacgtcgcaaatgtccacataagagtatcccctgtcctcacggattttcttgagattctcgtctttctcccagtcatcagcattcatgtttcaccttacaacacccaattctgaccatttggca

SEQ ID NO: 9571 - DNA, 437 bp, Triticum aestivum
  unsure at all n locations
  Clone ID: LIB30-002-Q1-E1-G10
attccgggccgacaccttcccaagacaatccatcgactttttcggtgctctgcgtgctcgggtgtacgacgacgaggtgcgcaagtgggtgacctctaccggtatcgagaacattggcaagaagctggtgaactcgcgggacggaccagtgacctttgagcagccaaagatgacagtggagaagctgctagagtacgggcacatgctcgtccaggagcaggacaatgtcaagcgtgtgcagcttgctgacacctacatgagccaggcagctctgggtgatgctaaccatgatgcgatgaagactggtaccttctacggttagaacattctccatacacacccaccatctcttgctgcatangaggaggtaaaggggcacagcaacgtactttgcctgtnacggcatgatgcaccgaccagactgccaagaacttcga

SEQ ID NO: 9572 - DNA, 432 bp, Triticum aestivum
  Clone ID: LIB30-002-Q1-E1-G3
ccgggtcgacagcgtcgtccactcaggcgcaggcgcagccggacttcgattacctgttcaagctcctcctcatcggcgactccggcgtcggcaagagcagtctcctcctccgattcacatccgactcattcgaggacctatccccaaccatcggcgtggacttcaaggtgaagatggttaacattgccggcaagaagctcaagctcgccgtctgggacaccgctggacaggaacggtttaggaccttgaccagctcttactacacacgggcacaagggatcatcatgggtatgtacgatgttactcgccgagaaacattcaccaatctctctgacatatgggccaaggaaattgacctgcattcgaccaaccaggactgtgtaaagatgcttgtcggaaacaaagtggacaatgaaaatgagagggctgtca

SEQ ID NO: 9573 - DNA, 427 bp, Triticum aestivum
  Clone ID: LIB30-002-Q1-E1-G4
gactacctgatccactacaagtgggtgccttgcctcgagttcagcaaggttgggttcatcttccgtgagcacaacgcatctcctgggtactacgatggccggtattggacaatgtggaagctgcctatgttcgggtgcactgacgccacacaggtgatcaacgaggtggaggaggtcaagaaggagtaccctgacgcgtatgtccgcatcatcggattcgacaacatgcgtcaggtgcagtgcgtcagcttcatcgccttcaagccaccgggctgcgaggagtccggcaaggcctaaacagctcactcacgacaggccatatataaagtgccattgcagttttgtcaactctgacattgctttgggttttccttccccatttatctttcctaattgttcctaagaatatgtgtatgtccatgttcat

SEQ ID NO: 9574 - DNA, 456 bp, Triticum aestivum
  unsure at all n locations
  Clone ID: LIB30-002-Q1-E1-G5
taccggactagaattccgcgtcgacaccttcacaggacaatccatcgactttttcggtgctctgcgtgctcgggtgtacggcgacgaggtgcgcaagtgggtgacctctaccggtatcgagaacattggcaagaagcttgtgaactcgcgggacggaccagtgacctttgagcagccaaagatgacagtcgagaagctgctagagtacgggcacatgctcgtccaggagcatgacaatgtcaagcgtgtgcagcttgctgacacctacatgagccaggcagctctgggtgatgctaaccaggatgcgatgaagactggttccttctacggttagaacattctccatagacacacaccatctcttgctgcatatgatgaggtaaaggagcacnagcatgtactttggcctgtgccgggaggatgcaccgaccagactgccaagaacctcgacccaac

SEQ ID NO: 9575 - DNA, 375 bp, Triticum aestivum
  Clone ID: LIB30-002-Q1-E1-G7
acgcgctaatgcagttacgacagatgggaataaagccgatggacagactttgcttgtcagcgatcggaacaagtacaagtcaatgcttatccgtacatattctactgtgtggatgattggcggctttgcattcctagtttatatgggccatctttatatctgggccatggtggttgtcattcaaatattcatggcgacagagctttttaatctactcagaaaatccagtgaagagaaacaactgccagggttcaggctcccgaattggcacttctttttcacggcaatgttgtttacatatggacgctttcttagtcgggagcttgttaacacagtatcttcagatcacttgttgtataagctcgtcagcagcct

SEQ ID NO: 9576 - DNA, 383 bp, Triticum aestivum
  Clone ID: LIB30-002-Q1-E1-G8
catcgagtataccctgttattgtgagaattcttaattcaagagttatagggagggacttatgtcaccacaaacagaaactaaagcaggtgttggatttaaagctggtgttaaagattataaattgacttactacaccccagagtatgaaactaaggatactgatatcttggcatcattccgagtaagtcctcagcctggggttccgcccgaagaatcaggggctgcagtatctgccgaatcttctactggtacatggacaactgtttggactgatggacttaccagtcatgatcgttacaaaggacgatgctatcacatccagcctgttgctggggaagacagtcaatggatctgttacgtagcttatccattagacctattt

SEQ ID NO: 9577 - DNA, 411 bp, Triticum aestivum
  Clone ID: LIB30-002-Q1-E1-H10
gcctccacctcccacctcatcgccgccgcaggctttgactccatcgcctcctccctcctcctcttcgtctccggcaggccaggtagttaacagctccagcagccatgggaaaggataagatccacatcagcattgtggtcattggccatgttgactctggcaagtcaaccacgactggccacctcatctacaagcttggaggcattgacaagcgtgtgatcgagaggttcgagaaggaagccgctgagatgaacaagaggtctttcaagtatgcctgggtgcttgacaagctcaaggctgagcgtgagaggggtatcaccattgatattgctctctggaagttcgagaccaccaagtactcctgcactgtcattgatgctcctggtcaccgtgatttcatcaagaacatga

SEQ ID NO: 9578 - DNA, 322 bp, Triticum aestivum
  Clone ID: LIB30-002-Q1-E1-H2
ccgggtcgaccgatctgcctacaaaccgcctaagaggcgcagagttctcagagagctgggccagatctatcaatggaaggggaatactatgattccctggtcgcacgatttggcgaacaaggatccctcatcgaaggattcgggagggaagccgaaggtccggacgcatatcggacacagcttcgtcagcggatgtcccaggatttcctgttgacgaacctggaagagcggaggcgagccgccgacgatgtatgcagtgacccagcctctaaaaaggccatgttgggtccgcatgtgctgaccgttggagaaacaatgggac

SEQ ID NO: 9579 - DNA, 432 bp, Triticum aestivum
  Clone ID: LIB30-002-Q1-E1-H3
gggtcgacagctccatgatgacaagaaactggctatcgttcgacgtggtccttcctgttgctctgtcatgcctgtttgggttatctatatccttctttggattctcctgcagacgggccatctctgctactggatttacggtgctcggtatagtgaacaagctcgtgaccgtcgtgatcaatctgcgtatctgggacaagcatgcgtcccttgtggggacaattgggctcttgatatgcatgtctggtggtgttctctaccagcaatcgaccagatagcccaaggtgcccaagatcgagccaaacgaagaggactatgaagacgggcagaatttgctgcacattcagcccgggcatgagagcagcccaagtcaaaatcattcctcatatgcctactttaccttccctcggcaacctattcgtggtatatctc

SEQ ID NO: 9580 - DNA, 333 bp, Triticum aestivum
  Clone ID: LIB30-002-Q1-E1-H4
ccgggccgaccagagattggacttatgttgagagggatgattgatcgcaagcagagtcgcgttgtgttagtgtcaccggacttcctaaagtaagattgtgaaagagctgctgaagtcacaccaagctagcacagcgttgatagtgcagttcatgacagtcttgattagcttgagatcatcaaggctgaagcgtcgatgcacgaagcgcttgcgacggcgagacccgctggcatctggcatatgcgtgaacatcgtacggggatctctcaagaacagtaccgtcgcagcatgcagtgcgacatccagcagcgtgtgccatgccagcacaagata

SEQ ID NO: 9581 - DNA, 401 bp, Triticum aestivum
  Clone ID: LIB30-002-Q1-E1-H5
gtgcctctagcgtagaatgcttgctcatgacgtgacgaacttagagtcgtctgagagtttggataatcatctgacttagtatacctgagtattggccataatttagaagaacattctgtcgtattagtaagatgaggaaaggttaaggatttacccggtgtgcgatatcacattagtcaaagaaccctagatgctgtcgcaatagtcaatcgtcaacaacggcgttctaaatatgtggtcaaaacaccactgggttaagtgattttagcccttataaaaacaggatcgattcatgagcctcttacacgctcatgtcacgtagaagtactgcatacaaaagaactggaaaatgggatacactttgtcgtaatccattagttaacatggtggttaaccatatt

SEQ ID NO: 9582 - DNA, 443 bp, Triticum aestivum
  Clone ID: LIB30-002-Q1-E1-H7
attcgcgggccgacaccttcccagaccaatccatcgactttttcggtgctctgcgtgctcgggtgtacgacgacgaggtgcgcaagtgggtgacctctaccggtatcgacaacattggcaagaggctggtgaactcgcgggacggacccgtgacctttgagcagccaaagatgacagtggagaagctgctagagtacgggcacatgcttgtccaggagcaggacaatgtcaagcgtgtgcagcttgctgacacctacatgagccaggcagctctgggtgatgctaaccaggatgcgatgaggactggttccttctacggttagaacattctccatacacacccaccatctcttgctgcatacgaggaggttaatgggcacagcaaggtactttgcctgtaccggcacgatgcaccgaccagactgccaagaacttcgacccaa

SEQ ID NO: 9583 - DNA, 329 bp, Triticum aestivum
  Clone ID: LIB30-002-Q1-E1-H8
gacagacgaaagcagggtatctaagtcgacatactaatacagagaacacataacgattgattcgcagcaatacatgtcattcacattcaactagaagtgcctaagttccgttttgagtggcaggtctaagggtgcgttcttcaatgtcaatgaaagcgtattcgtaaaaatagttggaagaagaagacttaattttccatagtacaatcttattctttagtaaaatcaagatcattttcgagcggtgatgaacatctaaaaccaaagggtttttctgggcaacatccaaataataagatttttgaataacatgaattgacttatcacaa

SEQ ID NO: 9584 - DNA, 256 bp, Triticum aestivum
  Clone ID: LIB30-002-Q1-E1-H9
taatcttgatatatctcagtcctgtgcactcgtgcaacgacaaagatgtacatgcgccgactatcgcgtccactcgcgctgagaataacactttgatactgatgcagatggcatgaccatgcctctcacgataggcatgaaaattttcgatcagtcgaggtttcgtcacactatcgattcttgctagcccattgccccataaaacttgtcatctccccccgccatccgtacaatctcatccctccccctccttttg

SEQ ID NO: 9585 - DNA, 389 bp, Triticum aestivum
  Clone ID: LIB30-001-Q1-E1-G6
gacagatgaatgacggtaaaccccaggtgcaggatcacatcggaggatgctctgtcacacgagttcttggctccgtgccgtgaaagcctcaagaagaacgcgcttaggattaggtcagcatcagcttctcaccctcctccctgcttgcctcgagatgccatggttaacgccaacgagttgtagcactcgtttcagaccttacttgacctgttttgacctgagtaagcttaagctgaaactggtaactgacgtgtcgtgtgtggctgtgtgccaatagcttgtttatctgtttattactgctgtaaatgctgtacttaaaaaatgtaacaatctaatgttcccgtgtgctgacaaggttgccagaaaaaaaaaagacgggcggaggaaaa

SEQ ID NO: 9586 - DNA, 417 bp, Triticum aestivum
  Clone ID: LIB30-001-Q1-E1-H6
aattcccgggccgacgtcgtcaccggcacccgcgtcaagacccacttcgcccggcccaactggcgcaaagtctacaaggacatcgccctcaagcacgccgggcagcgcgtcggagttttctactgcggcgcgccggtgctgatcaaggagctgcgccagcttgcccaagatttctcgaggaagacgagcaccaaattcgagttccacaaggagaatttctaactttgcagccagcccagtcacaagaagttcctcctttttttttagaaaagaaacaagtttctcttttcgcgaggaaaaagtctgttaattcagtacatacccagttctatagatggaagtaggtgttggttgattttcacaagctgggtcaagagttacatcgatttttttgcctaacaaaaacacaagaagtcg

SEQ ID NO: 9587 - DNA, 343 bp, Triticum aestivum
  Clone ID: LIB30-001-Q1-E1-H7
attcgcgggccgacatcggcaggagcgtcatccatggaagcgactcagttgagagtgcgaggaaggagatcgccctgtggttccctgagggcattgcagagtggaggagcagccagcacaactggatctatgaggcctaagatgtgtcatgagtggttgagtgcaggtttcattaagcatctaccaaactagtctttggttgtttacagttttgagatttgtatcttgggaaccttgtttgtgtgaactgaagttatctccttgtgcttgggcatccaagcggtatctgctgctctatatttgatatatggtattgctgtaaaaataaaaaagggcactacaa

SEQ ID NO: 9588 - DNA, 264 bp, Triticum aestivum
  unsure at all n locations
  Clone ID: LIB30-001-Q1-E1-A12
taccggtcttatnttcccgggtcgacaagagcacaataaaaaaccaaggcttaactgcagttcgtgtgttgcttatattatatgttgctattatattaccattattaagtgagggaggaattgattagtgccagtgtttgattttgttctgtttgtcatggtacgaggaaagattaccgagtagataaggtctagtagcagtttcgctgtacctaatcagtacccttgtttcattccgactagtaagtaaaaacttgtttttcc

SEQ ID NO: 9589 - DNA, 357 bp, Triticum aestivum
  Clone ID: LIB30-001-Q1-E1-A6
ggtaccgatctagaattcccgggccgacaacttcatagaatacaccagcgacttttgcggtgctctgagtactgttgtgtacaactaccatgtgcacaagtcagcgactgcgaacgataacgacaagattggcaaaatgttggtgaagtctcggtacggatgcatgaactttgagcaggtaatgatgacagtggagaaggtgctaaagtactggcatatgcctgacgaccaccacgacagtgtcaagcgtatgcatcatgctgacacctacatgatcaacgcatttctgggtgatgctaaccaggattcgatgaaggctgattcattccactcgatacacattctccatacactgcc

SEQ ID NO: 9590 - DNA, 423 bp, Triticum aestivum
  Clone ID: LIB30-001-Q1-E1-C1
gcgacgcagaaaacggcgactcttacgcaatagcattgtatttggaggacaagtaccctcagcgccctcttttgccccaagaccttaaaaagaaggccctgaatatccagatagcaagcattgtgtgttctggtattcaacctcttcacaatctcaccttggtgagatttatcgagcaaaaagttggaacaggggagagcatcccgtgggtcaaacaacagattgatagaggtttcacagctgttgagaacatgatcaaaggctgtgctgggaagtttgctatgggagatgaagtccaactggcagatgtattccttgcaccccagatttttgctgcggtgactcgttatcaaatcgacatgtcgaactatcccaccctcgcgaggctctacgatcaatatatgacacaccctgcatttgaag

SEQ ID NO: 9591 - DNA, 476 bp, Triticum aestivum
  Clone ID: LIB30-001-Q1-E1-C10
taccggtcctatcttcccgggtcgacaccttcccaggaaaatccatcgactttttcggtgctctgcgtgctcgggtgtacgacgacgaggtgcgcaagtgggtgacctctaccggtatcgagaacattggcaagaggctggtgaactcgcgggacggacccgtgacctttgagcagccaaagatgacagtggagaagctgctagagtacgggcacatgcttgtccaggagcaggacaatgtcaagcgtgtgcagcttgctgacacctacatgagccaggcagctctgggtgatgctaaccaggatgcgatgaagactggttccttctacggttagaacattctccatacacacccaccatctcttgctgcataggatgaggtaaaggggcacagcaaggtactttgcctgttacggcaggatgcaccgaccagactgccaggaacttcgacccagcggcgaggagttacgaccgga

SEQ ID NO: 9592 - DNA, 449 bp, Triticum aestivum
  Clone ID: LIB30-001-Q1-E1-C3
ccggtctagtattcccgggccgactacctgatccactccaagtgggtgccctgcctcgagttcagcaaggttggcttcgtcttccgtgagcacaacagctcccccgggtactacgacggtcgatactggacaatgtggaagctgcccatgtttgggtgcaccgacgccacacaggtgctcaacgaggtggaggaggtcaagaaggagtaccctgacgcctatgtccgtgtcatcggcttcgacaacctgcgccaggtgcagtgcgtcagcttcatcgccttcaggccaccgggttgcgaggagtccggcaaggcctaaactacgagttgaaacaatggcctatctcgtatgaaggtcttttgtgaacttcacttttgtccacaactctgctgcacgactctgctttcggaccggagcataccttttgttctatatgatttgtgtatgta

SEQ ID NO: 9593 - DNA, 421 bp, Triticum aestivum
  Clone ID: LIB30-001-Q1-E1-C5
gtacctatcaggaattcccgggccgacgacatactggaactcatcggtgatcactgccatggtgtcatcggccagctaacagaggactggggggaagtgctcttctctgcgctcaagcgtgccggcgggacagccttcagcaacatggccgtcggttacaacaacgttgatgtcgatgctgccaacaggaatggcatcgccatcggcaacacgcctggtgttcttactgagacgacggcggagctggcggcgtcgctgtcggtggcggctgcccggaggatcgttgaggccgaccaatttatgagggctggtctctacgacggatggctcctgcacttgtttgttgggaacttgctcaaggggcagactgttggagtgatcggagctggccgcatcggctcagcttatgcaaggatgatga

SEQ ID NO: 9594 - DNA, 448 bp, Triticum aestivum
  Clone ID: LIB30-001-Q1-E1-C6
ggtaccggtctagaattcccgggccgactacttgatccgctccaagtgggtgccctgcctcgagttcagcaaggttggtttcgtcttccgtgagcacaatagctcccccggatactatgacggtcgatactggacaatgtggaagctgcctatgttcgggtgcaccgacgccacacaggtgctcaacgaggtggaggaggtcaagaaggagtaccctgacgcctatgtccgcgtcatcggcttcgacaacctgcgccaggtgcagtgcgtcagcttcatcgccttcaggccaccgggttgcgaggagtctggcaaggcctaaactacgagttgaaacaatggcctatgtatgaaggtcttttgtgaacgtcacttttgtccacgactctgctggacgaccagagcatatttttcattctatatggtctgtgtatgtatgtacgaacat

SEQ ID NO: 9595 - DNA, 451 bp, Triticum aestivum
  Clone ID: LIB30-001-Q1-E1-C7
gtaccgatctagaattcccgggccgacgacatactggaactcatcggtgatcactgccatggtgtcatcggccagctaacagaggactggggggaagtgctcttctctgcgctcaagcgtgccggcgggacagccttcagcaacatggccgtcggttacaacaacgttgatgtcgatgctgccaacaggaatggcatcgccatcggcaacacgcctggtgttcttactgagacgacggcggagctggcggcgtcgctgtcggtggcggctgcccggaggatcgttgaggccgaccaatttatgagggctggtctctacgacggatggctcctgcacttgtttgttgggaacttgctcaaggggcagactgttggagtgatcggagctggccgcatcggctcagcttatgcaaggatgatgattgacgggttcaagatgaacttgatctact

SEQ ID NO: 9596 - DNA, 448 bp, Triticum aestivum
  Clone ID: LIB30-001-Q1-E1-C8
gtaccggtctagaattcccgggccgacggatgatgggagcgagattttatcgcattcatgcattcttggcatcagatctcccgttctgagaagtatgctggaagaagctagagtggaagatggtctcagaaacatcctgatttccggtgtaccatctcaagcagtccgtgtcttcatcagatttctgtattcttcacgctttgagcaggatgagatgaagaaatacgcccttcatttgctcgtactctctcatgtttactcggtacaatctctgaagatcgtctgtaccgaccagctcgagaggttttttctcgctcctgataacgcggtggacgttctacaacttgcacggctatgtgacgcaccaaggctctcactcatctgtactcgtatgatcactggagatttcaagaccatctctctgtcagaagggtggaaagtgatgaga

SEQ ID NO: 9597 - DNA, 444 bp, Triticum aestivum
  Clone ID: LIB30-001-Q1-E1-D5
gtaccgatcaggaattcccgggccgaccagggttgcacggcccgatccaacgcctcgtccgacggcgctgccggccggcgatggatatggagaggagctcgggtcttccttgtgtatattagggcagcagtagttttagtttgtcttggcttcatgccgtggtctggcgttatgccgtggggatgcaaaccactggagctctcgagcggcgtctggtggtggcctccgtcgttttctttcttgccaccatggtggtggaaagtggaagacgccggatctggcaagatccccttgaataagctcgttctggtgttgtggtgttccctgatctggagggcatccaactgctactgcttgttttctcaggctaccatggtggtggatgagaagcaggatagttgcagaatcctgaagtttataggtcgagttcgagcatatcagcag

SEQ ID NO: 9598 - DNA, 391 bp, Triticum aestivum
  Clone ID: LIB30-001-Q1-E1-D6
gtaccggactagaattcccgggccgacggacacaaccaaggcggcactctagatgaacgtgctcaagctggtgaccgcgacgcatgcggcaagattagggttcatagcatggacatcagtctcgtcggcatcttctgcaggtgcggcttcctcgtccacaccatcatcactcgcaccggtcaacacaacatccacgtgtaacacatggccgggtctctgaatgcaagcacctctgtatatgccacaaacctagctcctgtgaatttatgtatgtatgcacgcagtgtaacagatcgtagtatattctgaatgtgtatatcagtatctctgttacgatgaatctcctatctaacaacgttaagaggagattctctgcaagagcttaggtgtt

SEQ ID NO: 9599 - DNA, 265 bp, Triticum aestivum
  Clone ID: LIB30-001-Q1-E1-D7
gtaccgatctagaattcccgggccgacctcatccgtaacatgcacagctccaagtaaatgagaggcatgaagttactggggagagtggtttgccccagaggagtgttcaaagcctttcttctgagaataaatttttgtgtggaattatgtcagctaaaaaccttttattggatgtatcctgatggttggttgggcttagagctcacattttggtggtattatgtacttgcttgaactaaatcatgagtcattttcactcatcttc

SEQ ID NO: 9600 - DNA, 454 bp, Triticum aestivum
  unsure at all n locations
  Clone ID: LIB30-001-Q1-E1-D8
gtaccggtctagaattcccgggccgactacctgatccgctccaagtgggtgccctgcctcgagttcagcaaggttggcttcgtctttcgtgagcacaacagctcccccgggtactacgacggccgatactggacaatgtggaagctgcctatgttcgggtgcaccgacgccacgcaggtgctcaacgaggtggaggaggtcaagaaggagtaccctgacgcctatgtccgcgtcatcggcttcgacaacctgcgccaggtgcagtgcgtcagcttcatcgcattcaggccaccgggttgcgaggagtctggcaaggcctaaactacgagttgaagcaatggcctatgtatgattgtcttttgtgaacttcacttttgtccaggactctgctttccgaccagagcatatttttcgttcggtatgatctgtgtntgtacgaacataggttgtggag

SEQ ID NO: 9601 - DNA, 337 bp, Triticum aestivum
  Clone ID: LIB30-001-Q1-E1-E10
taccggtcttatcttcccgggtcgacggctacagcccaatatacacgccagaggaatggtctgaatctggtgaccgctacgccggcggaacgaccgggcttcttatctgggccgtcaccctcgccggcctcctcggcggcggcgtcctcctcgtctacaacaccagcgctctcgccggctaagagagcatctacgtgtaacacagggccgggtctctgcttgcatgcacgtctctgtaatctacatagctacctcctgtgaatgtatgcaatcaacgatgcaaagtaattgatccgaacagatggtttatgtgtatgcaaaagaaaaagagactcac

SEQ ID NO: 9602 - DNA, 179 bp, Triticum aestivum
  Clone ID: LIB30-001-Q1-E1-E6
ggtaccgatcaggaattcccgggccgaccgacagaagaggtcccacacttcacaaatccccaccaatcgaacacacactcctcccggctccctcaaatggcgctcctcgctgtcaagggcatggccatttcaacggcggccttccctgggaacaacaacggggccttaccttctcctcc

SEQ ID NO: 9603 - DNA, 351 bp, Triticum aestivum
  Clone ID: LIB30-001-Q1-E1-E7
ggagccgtcgtcgtcgtccaacccctccgacctcacacccaactttgcctttccccatccctctgcgccctcgccgtccgcggatcaaccgatttcgcacgcaatgtctcagactgttgaactcagggttggcatgtcatgtgagggatgtgttggagctgttaagcgggttcttggcaaaatggaaggtgttgagtccttcgatgtagacatcaaggagcagaaggtcactgtgaagggtaatgtgacgccggatgctgttctgcagactgtttcgaagacaggcaagaagacatcgttctgggaggctgaaccctcggcatctgctgtttcgtcctaaaagacgcatct

SEQ ID NO: 9604 - DNA, 433 bp, Triticum aestivum
  Clone ID: LIB30-001-Q1-E1-F3
cgggtcgacgagatttacaaggatgcatcaatcgcgctgagtccaaatgttcctgggcagatcttcatgggacttatggtgaaccctcctaaacctggagacatctcgtacctgaagtattctgctgaaagtaagtctatccttgaatctttgaggaggagggcacaaataatgacagacggtttcaatagttgccgaaatgttgtctgcaatttcacagaaggagctatgtattctttcccgcaaatacggctgccgcaaagagctatggatgtagcaaaaagcgctggcaaagcgcccgatgtttactactgcctcaagcttctggaagccactggaatatccactgttccaggctcaggttttggtcagaaagaaggggtgttccatctgaggacgacgatcctgcccgcggaggaagacatgccggcga

SEQ ID NO: 9605 - DNA, 442 bp, Triticum aestivum
  Clone ID: LIB30-001-Q1-E1-F6
gtacctatctagaattcccgggccgacttttccactaacaaccccaaaaaacccaactctgccttacgtaaagttgccagagtacgattaacctctggatttgaaatcactgcttatatacctggtattggccataatttacaagaacattctgtagtattagtaagaggaggaagggttaaggatttacccggtgtgagatatcgcattattcgaggaaccctagatgctgtcgcagtaaagaatcgtcaacaagggcgttctagtgcgttgtagattcttatccaagacttgtatcatttgatgatgccatgtgaatcgctagaaacatgtgaagtgtatggctaacccaataacgaaagtttcgtaaggggactggagcaggctaccatgagacaaaagatcctctttctaaagagattcgattcggaactcttatatg

SEQ ID NO: 9606 - DNA, 454 bp, Triticum aestivum
  Clone ID: LIB30-001-Q1-E1-F7
gtaccgatctagaattcccgggccgacggcgacgcagaaatcggcgactcttacgcaatagcattgtatttggaggacaagtaccctcagcgccctcttttgccccaagaccttaaaaagaaggccctgaatatccagatagcaagcattgtgtgttctggtattcaacctcttcacaatctcaccttggtgagatttatcgagcaaaaagttggaacaggggagagcatcccgtgggtcaaacaacagattgatagaggtttcacagctgttgagaacatgatcaaaggctgtgctgggaagtttgctatgggagatgaagtccaactggcagatgtattccttgcaccccagatttttgctgcggtgactcgttatcaaatcgacatgtcgaactatcccaccctcgcgaggctctacgatcaatatatgacacaccctgcatttgaagctg

SEQ ID NO: 9607 - DNA, 451 bp, Triticum aestivum
  Clone ID: LIB30-001-Q1-E1-G1
ccggtctagaagtcccgggccgactctggtaagtagaaaaccactggccacctgatctacaagcttggaggcattgacaagcgtgtcatcgagaggttcgagaaggaagccgctgaaatgaacaagaggtctttcaagtacgcctgggtgcttgacaagctcaaggccgagcgtgagagaggtatcaccatcgatattgctctctggaagttcgagaccaccaagtactactgcaccgtcattgatgcccctggtcaccgtgacttcatcaagaacatgatcaccggtacctcccaggctgactgtgctgttctcatcattgactccaccactggtggatttgaggctggtatctccaaggatggccagacacgtgagcatgctctccttgctttcactcttggagtgaagcagatgatctgctgctgcaacaagatggacgccaccactc

SEQ ID NO: 9608 - DNA, 451 bp, Triticum aestivum
  Clone ID: LIB30-001-Q1-E1-G5
gtaccgatctagaattcccgggccgactacctgatcaactccaagtgggtgccttgcctcgagttcagcaaggttgggttcatcttccgtgagcacaacgcatctcctgggtactacgatggccggtattggacaatgtggaagctgcctatgttcgggtgcactgacgccacacaggtgatcaacgaggtggaggaggtcaagaaggagtaccctgacgcgtatgtccgcatcatcggattcgacaacatgcgtcaggtgcagtgcgtcagcttcatcgccttcaagccaccgggctgcgaggagtccggcaaggcctaaacagctcactcacgacaggccatatataaagtgccattgcagttttgtcaactctgacattgctttgggttttccttctccatttatctttcttatttgttcctaagaatatgtgtatgtccatgttcat

SEQ ID NO: 9609 - DNA, 340 bp, Triticum aestivum
  Clone ID: LIB30-001-Q1-E1-G8
attcccgggccgacggctacagcaagatctacacgccagaggaatggtctgaatctggtgaccgctacgccggcggaacgaccgggcttcttatctgggccgtcaccctcgccggcctcctcggcggcggcgtcctcctcgtctacaacaccagcgctctcgccggctaagagagcatctacgtgtaacacagggccgggtctctgcttgcatgcacgtctctgtaatctacatagctacctcctgtgaatgtatgcaatcaacgatgcaaagtaattgatccgaacagatggtttatgtgtatgtacgtaacgctgtaacgatatacttcctactttac

SEQ ID NO: 9610 - DNA, 408 bp, Triticum aestivum
  Clone ID: LIB30-001-Q1-E1-H1
gggtcgactaggcggactagtacgagtgaagagaaaaaaaagccatacggaactcaaaatattttccggagatattcattttcctgaagaggcggataagatattaggtggctgtttgataccgccagaaagacaaaaaaaagattctaaggaatcaaaaaaaaggaaaaattgggtctatgttcaacggaaaaaaattctcaagagcaaggaaaagtattttgtttccgttcgccctacagtggcatatgaaatggacgaaggaagaaatttagcaacacttttcccgcaggatctcttgcaagaagaaaataatctccaaattcgacttgtcaattttatttctcatgaaaatagcaagttaactcaaagaatttatcacacaaatagtcaatttgttagaacttg

SEQ ID NO: 9611 - DNA, 406 bp, Triticum aestivum
  Clone ID: LIB30-001-Q1-E1-H8
aattcccgggccgactacttgatccgctccaagtgggtgccctgcctcgagttcagcaaggttggtttcgtcttccgtgagcacaatagctcccccggatactatgacggtcgatactggacaatgtggaagctgcctatgttcgggtgcaccgacgccacacaggtgctcaacgaggtggaggaggtcaagaaggagtaccctgacgcctatgtccgcgtcatcggcttcgacaacctgcgccaggtgcagtgcgtcagcttcatcgccttcaggccaccgggttgcgaggagtctggcaaggcctaaactacgagttgaaacaatggcctatgtatgaaggtcttttgtgaacgtcacttttgtccacgactctgctggacgaccagagcatatttttcattcc

SEQ ID NO: 9612 - DNA, 446 bp, Triticum aestivum
  Clone ID: LIB30-001-Q1-E1-H9
ccgggtcgacttttccactatcaaacccaaaaaacccaactctgccttacgtaaagttgccagagtacgattaacctctggatttgaaatcactgcttatatacctggtattggccataatttacaagaacattctgtagtattagtaagaggaggaagggttaaggatttacccggtgtgagatatcgcattattcgaggaaccctagatgctgtcgcagtaaagaatcgtcaacaagggcgttctaaatatggggtcaaaaagccaaaaaaataagtgattttagcccttataaaaagaaaacggattcttgaacctctttcacgctcatgtcacgtcgaggtactgcagaaaaaagaactgcaaaatccgatccaatttttcgtaatcgattagttaacatggtggttaacccgtatatgaaagaccgaaaaaaatcattggc

SEQ ID NO: 9613 - DNA, 447 bp, Triticum aestivum
  Clone ID: LIB30-002-Q1-E1-A10
ggtactagtctagaattcccgggccgacgaggcttatagaccactgttgatcacctcaagcgcctctacatcgaccactatttccaagacgagatcgagaccatcatagactcgtgtgcagatctcatccatagtgatgatctgcttgatgcaaccctttccttgaggctgatgcgagaagctggatattatgtttcggcagatgatgttcttcagaagttcagaaacgataatggtgaattcaaccttgggctcagcaaagacattagagggttgctcagcttgcaagacatatcacacctcaacatgggagaatcatcactctacaaggcaaacgaattctcaagcaagcatcttagattcacaattaagtatttggagccaaaccttgcaatatatgtgaggcggtcactagaccatccctatcatgtgagcctgatgcaatac

SEQ ID NO: 9614 - DNA, 431 bp, Triticum aestivum
  Clone ID: LIB30-002-Q1-E1-A11
tcccgggccgacttatcatctaagggttgggattgcctctgtagcctctcggccctcagataaccatgtatggtatatgtggatgatatggccaatggcatggctatcaatggtactagcatgggtttatggatcatctgcgtttgtcgtcgaaagtctcaagctgaagaagatcatgatgcaaacatggctgataccaagatacaacttccagtacagcctgattagggagagggaatccatcaataggttaattgagcaggcaatatcagatgcggatcaaagaggggtcaaagtgctcagtcttggacttttcaatcaggaaagacaactcaatggaagtggtgaattatttacacaaaaatatccaaaattgagagttcgacttgttgacggaagtggcttagcaacagcagttgttctcaagagca

SEQ ID NO: 9615 - DNA, 388 bp, Triticum aestivum
  Clone ID: LIB30-002-Q1-E1-A12
attcccgggctgaccaagcagcaccgagatggctgctgccttctcctccaccgtcggtgccccggcttctacgccgaccaacttccttgggaagaagctcaagaagcaggtgacctcggccgtgaactaccatggcaagagctccaaggccaacaggttcacagtcatggcagcggaaaacctcgacgagaagaggaacacggacaagtggaagggtcttgcgtacgatatctccgacgaccagcaggacatcaccagagggaagggcatcgtggactcgctcttccaggcgcccacgggcgacggcacccacgaggccgtcctcagctcctacgagtacgtcagccatggactcaagaagtacgacttcaacaacaccatgggaagc

SEQ ID NO: 9616 - DNA, 448 bp, Triticum aestivum
  Clone ID: LIB30-002-Q1-E1-A2
gggtcgactgatgcggtgagtcataggagcgacaactttgatatagctaatggacatggtcatttccttatcaagtctacatctgatcttcaggaagctgtatcttcttgtttcgggaaagcattggtgaccagcagtgctctcatgcttgcgatgccgcccagttgcttggcagaagaatgtgacccggggtactctcttcctaacatgccgctgctgtttgcgatagccatggttggtgctactgttggagggctccttgcgagacaaaggaaaggggaacttaaaaagcttaatggtcagctacgtcagataaatgcttcactgagaagacaagccaagatcgaatcttatgctcctgctttgagctatgcaccggctgctagtaagataccagaatcagaagtcattgttgatcctcacagacagcgcctgctcccatatctga

SEQ ID NO: 9617 - DNA, 446 bp, Triticum aestivum
  Clone ID: LIB30-002-Q1-E1-A6
taccggactagcattcgccggccgacttttccactaacaaccccaaaaaacccaactctgccttacgtaaagttgccagagtacgattaacctctggatttgaaatcactgcttatatacctggtattggccataatttacaagaacattctgtagtattagtaagaggaggaagggttaaggatttacccggtgtgagatatcgcattattcgaggaaccctagatgctgtcgcagtaaagaatcgtcaacaagggcgttctaaatatggggtcaaaaagccaaaaaaataagtgattttagcccttataaaaagaaaacggattcttgaacctctttcacgctcatgtcacgtcgatgtactgcagaaaaaagaactgcaaaatccgatccaatttttcgtaatcgattaattaacatggtggttaaccgtattatgaaagacg

SEQ ID NO: 9618 - DNA, 430 bp, Triticum aestivum
  Clone ID: LIB30-002-Q1-E1-B5
acttttccaataacaaccccaaaaaacccaactctgccttacgtaaagttgccagagtacgattaacctctggatttgaaatcactgcttatatacctggtattggccataatttacaagaacattctgtagtattagtaagaggaggaagggttaaggatttacccggtgtgagatatcgcattattcgaggaaccctagatgctgtcgcagtaaagaatcgtcaacaagggcgttctaaatatggggtcaaaaagccaaaaaaataagtgattttagcccttataaaaagaaaacggattcttgaacctctttcacgctcatgtcacgtcgaggtactgcagaaaaaagaactgcaaaatccgatccaatttttcgtaatcgattagttaacatggtggttaatcgtattatgaaagacgcacaagag

SEQ ID NO: 9619 - DNA, 334 bp, Triticum aestivum
  Clone ID: LIB30-002-Q1-E1-B8
catcgagtagaccctgttattgtgagaattcttaattcaagagttatagggagggacttatgtcaccacaaacagaaactaaagcaggtgttggatttaaagctggtgttaaagattataaattgacttactacaccccagagtatgaaactaaggatactgatatcttggcagcattccgagtaagtcctcagcctggggttccgcccgaataaacaggggctgcagtagctgccgaatcttctactggtacatggacaactgtttggactgatggacttaccagtcgtggttgttacaaaagactacgctatcaaatcgagcctgttgctgg

SEQ ID NO: 9620 - DNA, 441 bp, Triticum aestivum
  Clone ID: LIB30-002-Q1-E1-C10
aattcccgggccgaccagaactggacacttgtggatgctcctgatatggtcaggtgccagatgaacttcaagcgtctttcgctgaccgacatcaagattgacatcaagcgtatccctaagaaggcaactttgatcaaggccatggaggaagcagatgtgaaaaccaaatgggagaacagctcatggggtaagaagcttgttgtccagaagagaagagcatcgctgaatgactttgacaggttcaaggtcatgttggctaagattaagaggggtggtgcgatcaggcaagagcttgccaagctcaagaaggaggttgctgcttagattatcttagtggatggcatgttgagttttttgttccaagttggatctgctctatgttccagtgttcttaaagccagaattagtacaactgttttcggagaactacttcatattttg

SEQ ID NO: 9621 - DNA, 314 bp, Triticum aestivum
  Clone ID: LIB30-002-Q1-E1-C2
cggtctagcattcccgggtcgacatctaacggcaaattggcatcgagttgaccctggcatcgtgagcagtcgcaggtcatagacatatatggagggacgtatgtcaccatatttgtatgctatggcacgtgttggatacatagcaggcgttaccagaaaatctgtgactgacgacacgccatcatatggggctatcgaaacggaaatctcggcagtattcctactagctcctcaacctgaggttccacccgttgaagtaagtgctgtactagctagcgaatcttctactggtacatggacatgctgcctggtct

SEQ ID NO: 9622 - DNA, 451 bp, Triticum aestivum
  Clone ID: LIB30-002-Q1-E1-D6
attcgccggtcgacgccggaaagcagcctgaaagatcatatgtgagagccatcttttgcgatctgcaggcttgcatctctgagcccgctagaatttttcattactggacgcggaatattgttggaggacttcttaattgggttaattgggtaccagcaagggaaagtgcaagaggaactggagaagtaggagaaacaatcaaggtaatggaaacaagaacggcagaaaaagaatctccttatgactacaaccagaaacagtctgatgtgtaccatggcatcggcgatggcaacgctggcagcagcgtagatggtgatgatgataagaaggcgtgccatgacattcgtgatagtggctttgactatgggccccaagacatggctgatgggtactacagcggcagccattatggcatcgatagggagttgccaccactgagtcatagaatttc

SEQ ID NO: 9623 - DNA, 441 bp, Triticum aestivum
  Clone ID: LIB30-002-Q1-E1-E11
attcccgggccgaccatctgacaatcgtaataagcagaaaagaagcagggacacaccgccttcagctccaccgttaccgcaacacttgtccagggctctaccgacgtcaagagttcactctgaccacaaggatctgcatatgattgagaagaagatcagggacctcgacaaggccagggatacgttgaagatgaggaacctgaagaatgagctgactgctgccaggtgtaagctcaaacagtcaagagaagtgatcagcaatggcaagaaggctctcctagatggtgctctgatccagctccacgcgtacaagaaactagaatcacttactcggctcactatatgagtgagctgaccacgcttttcgccattattatactcgatatcatgagaatggtccgccggtgtaaaacttgttgctgcctagtctgcaaaataaaa

SEQ ID NO: 9624 - DNA, 438 bp, Triticum aestivum
  unsure at all n locations
  Clone ID: LIB30-002-Q1-E1-E12
aattcccgggccgacgaggccttcatcgctaagtatgatgtcaagctgaacaatgccattctcgccgaggacaagcacttgcccatgtatgatgagttgtccagcaagggcaatgttgaatatattgctggaggagccacgcagaactctatcagggttgcccaatggatgcttcaaactcctggtgcaacaagttacatgggttgcattggaaaggacaagtatggtgaggagatgaagagtgccgctaaagctgcaggagtcactgctcactactatgaggatgaggctgctcctacaggcacatgtgctgtctgtgttgttggtggtgaaaggtcattgattgcaaacttatctgcagcgaactgctacaaatctgagcatctaaagaagccagagaactggcactagttgagaaagcanaatacatctacattg

SEQ ID NO: 9625 - DNA, 423 bp, Triticum aestivum
  Clone ID: LIB30-002-Q1-E1-E5
ggccgacttctacaggaaaattcctagggatttgacggaggcatcactatctggcgctggattatccatatttgcagcactggcaatggtgtttttgtttggaatggagttgagtagttacttagcagtcaataccaccacatctgtaattgttgacaggagttcagatggggagttcttacggatagattttaacttgagctttcctgcgctttcatgtgaatttgcatcagttgatgtcagtgatgtgctgggaacacacagactaaacataacgaaaactgttcgcaagttttcaattgatcggaatttagtacctactggatctgagttccatgctggaacgatacccactgtcaacagacatggacatgatgtttacgaataccatggtgatggttcagttgccttgtcctctcacaa

SEQ ID NO: 9626 - DNA, 444 bp, Triticum aestivum
  Clone ID: LIB30-002-Q1-E1-E8
attcgcgggtcgacaaacatacgtaaccaaggtcgagagggggaaccgacttagcagtctcatctatccatttcatattgccttgcacaatgatccccttgagtatgttcgcaaggcaaaaaggtctatgcataggaaaaagagctctttagaagtgaagtttatacaagtggttgttcaatttttggtgaaatactttggcgcaaagacaggagcttttatcttccgcctatttgccacacgtacaagcacactcttatcaaatgtcgttgggccatctgaacatataacgctatgtgggcacccaatttccttcatggcaatcaccgcctacgggcaaccacaggcactgatcatgcacttcctaaattacggtagcactatccgggtaactctggcagttgatgacgaacaattcccagattgtcataagcttttagatga

SEQ ID NO: 9627 - DNA, 434 bp, Triticum aestivum
  Clone ID: LIB30-002-Q1-E1-F11
aattcccgggccgaccatatattaaaaaaggggaaccacatccttgtcacacgggctaccccaatactgaatgacgatgtggttaagcaatgtgttgacacaagacttggaagggactatcctcataaggctgttgcacagtgagcagcagtcactgcattgtacgtccaatacgaagccgacgatcctgccaaacatgagcatcatcctcaatcgagcaccagcgactgctgaaccctctagcacttgacccacagggatgatcacgcaggacgccaagctgcattcaagccttatgtaagaaatactagatcatgctaaatgagccatcaattgtagtgcttgctgcgcatgtggcacgcagtttttgtacatatgtgattattcttcgcaagttgtaagcctcgagattctagtaccagaaatatgtgatt

SEQ ID NO: 9628 - DNA, 439 bp, Triticum aestivum
  Clone ID: LIB30-002-Q1-E1-F9
attcccgggccgactacctgatcagctccaagtgggtgccttgcctcgagttcagcaaggttgggtttatcttccgtgagcacaacgcatcccctgggtactacgatggccggtactggacaatgtggaagctgcctatgttcgggtgcaccgacgccacgcaggtgatcaacgaggtggaggaggtcaagaaggagtaccctgacgcgtatgtccgcatcatcggattcgacaacatgcgccaggtgcagtgcgtcagcttcatcgccttcaagccatcgggctgcgaggagtccggcaaggcctaaacagctcactcaccacgggccacatataaagtgccattgcggttttgtcaactctgacattgctttgggttgtccttttccatttatctttcttgtatgttcctaagataacaatatgtgtatgtccatgt

SEQ ID NO: 9629 - DNA, 403 bp, Triticum aestivum
  Clone ID: LIB30-002-Q1-E1-G11
aattcccgggccgacggtgatgttattcttccgcaacaagcacatcatgattgatctcgggacaggaaacaacaacaagatcaactgggcattgaaagacaagcaagagtttgttgacattgtggagaccgtctacagaggagctcgtaagggccgtagtctggtgattgctcccaaggattactccaccaagtaccgttactgatgtatctgtgccaggctattcatgtgcagtgtgtggcctgctctgttctgtgaaatgagctgtgtgacccttgatgtaatgtctgtcaactttgaaagtgtcgcgtaactatgtatctgtatcttaaatacatgtcataaatctgtaagcctttgaatcaggacctgcagtcgattggtattactgattagagtgata

SEQ ID NO: 9630 - DNA, 440 bp, Triticum aestivum
  Clone ID: LIB30-002-Q1-E1-G12
attcccgggccgacggccattggatcgttcaaggagcagttgatgtggacattggagccaatccctctgctgagggtggtggtgatgatgagggtgtcgatgaccaggccgtgaaggtggttgacattgttgacaccttccgtcttcaggagcaacctgcttttgacaagaagcagtttatctctcacatgaagcgctacatcaagaacctctctgccaagcttgaaggggatgacctagatgttttcaagaagaatgttgagtctgccacaaagtatcttcttagcaagctcaaggaccttcagttctttgttggcgagagcatgcatgatgatggcggcgtggtgttcgcctactacaaagagggagctgctgatccaactttcctgtacgttgcacatgggctgaaagaggtcaagtgctaatcccactgtatgcta

SEQ ID NO: 9631 - DNA, 359 bp, Triticum aestivum
  Clone ID: LIB30-002-Q1-E1-G9
gagcctccggatccatccatccgcccctcgctgccgctgcgtctcgtctccaccacccgacttgcccccggactcaggaggatcgtccgagatgtcagacaccgatgagcaccacgtcgagtccaaggccgaatccggcgcctccaatacctatccgcagcaggctggcgccatccgcaagggtggccacatcgtcatcaatgcccgtccctgcaaggttgttgaagtcaccacctccatgactgggaagcatggtcacgcaaagtgtcactttgttgccaatgagatctttaatggaaagaggcttgacgatatcgttccttcaagctacaactgtgacgtcccccatgtagactgcc

SEQ ID NO: 9632 - DNA, 424 bp, Triticum aestivum
  Clone ID: LIB30-002-Q1-E1-H1
cgggtcgaccctttccactaacaaacccagagaaacccaactctgccttacgtaaagttgccagagtaggattaacctctggatttgaaatcactgcttatatacctggtattggccataatttacaagaacattctgtagtattagtaagaggaggaacggttaaggatttacccggtgtgagatagcgcattattcgaggaaccctagatgctgtcgcagtaaacaatcgtcaacaatggcgttctaaatatggggtcaaaaagccaaaaaaataagtgattttagcccttataaaaagaaaacggattcttgaacctctttcacgctcatgtcacgtccatgtactgcagaaaaatgaactgcaaaatccgatccaacttttcgctatcgattagttaacatggtggttaaacgtattatg

SEQ ID NO: 9633 - DNA, 431 bp, Triticum aestivum
  Clone ID: LIB30-002-Q1-E1-H11
aattcccgggccgacgtgcgcacgatgggtctgggattgggagcgccgttcttcctcctcgtccgtctcttgctggccgccggctctggagctatgccgcaggacaggacgattcacaggaattatgttctgctcgatctcgatacaattgagatccgcccaaatggcaaggaggaaattagttctagcaaaattcatgtctctgttgagagtggcagcacaatatgctcaacttgcgagaacttgacaaataaagctgtcagttatcttagtgaggaacaaacacaagatgagatcatggagattcttcatggtgcctgttctcagacattctccttagaacagaagtgtcttgagatggtggactcctatgcaactctgctctttgccaaggtaactgaaatcgagccagacgagttctacaaacggta

SEQ ID NO: 9634 - DNA, 441 bp, Triticum aestivum
  Clone ID: LIB30-002-Q1-E1-H12
attcccgggccgacgtactccttactggctgggagatggtcatggggacgattgtatggcgtccagataggctctcccacaaagagccgcattgccttgatgtagttgtcactatccaatgtaaagcggtgatacattcctgcaggcaaaacaatcatgccacctttcttaactgctatacggatccactgttcgttttggtccctcacatcaaagtatccactgccctcgagacaatagcgtatctcttcatcagtatgcaagtgctcttcaaagaagttcttcagcttggcctcatagtttggcaacttctctggacatacgtcgcaaatgtccacataagagtatcccctggcctcacggattttcttgagattctcgtctttctcccagtcatcagcattcaggttccagcttacaacacccaattctgaaagtttg

SEQ ID NO: 9635 - DNA, 348 bp, Triticum aestivum
  Clone ID: LIB30-002-Q1-E1-H6
gactacctgatccgctccaagtgggtgccttgcctcgagttcagcaaggtttgggttcatcttccgtgagcacaacgcatcccctgggtactatgatggccggtactggacaatgtggaagctgcctatgttcgggtgcaccgacgccacacaagtgattaacgaggtggaggaagtcaagaaggagtaccctgacgcgtatgtccgcatcatccgattccacaacatgcgccaagtgcaatgcgtcagcttcatcgccttcaagccaccgggctgccatgaatccggcaaggcctaaacagctcacatcacgacatgccatatataaagtggcaatgcagttttgtc

SEQ ID NO: 9636 - DNA, 388 bp, Triticum aestivum
  Clone ID: LIB31-001-Q1-E1-A1
gggccgacagctcgacgaagggagcggcgaggcagcgggcagctgcgtggcacgcatgctgtgctcgccgtcgagcagctggttgcctgtgctggtgagtgcaagcagctcgctggcacaggaggtgggctgggccagtaggttggccggctgatgggcttctaggtaagactctggtcctttttgttttttcttttatttatttcctgctctgggtattgaaatagaataaatactatttcatttccaaaaactctggaaatattcagaggcacatttgagaatattctcaactgcccgaaaatgcttccaagattatttgagcactttagaatatttatagcacttaaaatgcccaaattcaaatacttatgggttgttcaaaaat

SEQ ID NO: 9637 - DNA, 425 bp, Triticum aestivum
  unsure at all n locations
  Clone ID: LIB31-001-Q1-E1-A11
aattgccggctcgacccaaccatgaaacagtgggaacagatcaggcagcttatgagatcaaaagcattgctgccattctttgacagtgcttatcaaggatttgcaagcggaagccttgacaaagatgcccaatcagtgcgcatgttcgtcgctgatggtggtgaattgctcatggctcaaagctacgccaagaacatgggattgtatggagagcgtgttggtgctttaagcatcgtttgtgggagtgctgatatagctgttaaggttgaaagtcaacttaagcttgtaattaggcctatgtattcgaaccctcctcttcatggtgcttctatcgtggctaccatacttaacgacagtgctatgttcgacgaatggactctggagctgaaggccatggctgatangataattagcatgagggagca

SEQ ID NO: 9638 - DNA, 459 bp, Triticum aestivum
  Clone ID: LIB31-001-Q1-E1-A8
ggtaccggtctagaattcccgggtcgacagacgacagaagggtatccaatgcaatttattttgcaaaaaaagaaaagtgtacaaaaatgaatatgcatgcatgtacatctccagcaccttactgaacctaactgaacttcagactaaagaagtacaatttacttggttcagactaaagaagtacaatttacttggctttacatatgaagaagcagaaaaagaaccagactaactgaacctaactgaacttaaacacacaaaaacagtatgatctgccacactctccagcaccttacaactgcatgaaaaaacacacaaaaacacctccaaatctattggctgcttgaacaataaggacacgagaaaataactaaaaaatcctagagttgactatagagttgaagctattaaactttgcttgatccacacagacaactaccctaatctcttcagatatga

SEQ ID NO: 9639 - DNA, 429 bp, Triticum aestivum
  unsure at all n locations
  Clone ID: LIB31-001-Q1-E1-A9
aattcccggctcgaccagagtctaaaatgtcggtgcagataggcggcagaaagtggtagggacgaaatcccatgccgtttggagcgcgacctccgcctaccgacaacagcagtcgagcttagggtggccgccgcgatagaagttgatgagatgcagagttgcggaggagtccgcggcgagtgggtggggatgaagtgggcgagggttttcttttttccttttgcatgtgtgagtgaacacacacggttcgcagaggcgacagagatgaatcatgtgcgatagtaaatcaccgagattgaatggcaatccaaatttcctttgtcctttgtccatgagttttttctacgatgaacataaccctgctaatcaccgtgttcaaatttggcacttttccaggttcatttacantatttaagggattatgtgcat

SEQ ID NO: 9640 - DNA, 440 bp, Triticum aestivum
  Clone ID: LIB31-001-Q1-E1-B10
ggtaccgtatcaggaattcccggctcgacgagatgacgaagcgcaccaagaaggctggaattgtcggcaaatatggtacccgttatggtgccagtttgcgtaagcagatcaagaagatggaggtgtctcagcactccaagtacttctgtgagttctgtgggaagtttgctgtgaagaggaaagcagttggaatttggggatgcaaggactgtgggaaggtgaaggctggcggtgcttacaccatgaacactgccagtgcggtcactgtcaggagcactatccgtcgcttgagggagcagactgaagcataagttgctactagtgttttgtcctagtgaatcatctgggattttgcagtttagacgatactttggattcagttctgttggctgtttagtcaaggattatctttgtacttggtgcgatgatgttctgttatg

SEQ ID NO: 9641 - DNA, 330 bp, Triticum aestivum
  unsure at all n locations
  Clone ID: LIB31-001-Q1-E1-B11
gtcgacccgatgagattctaccgccaacggagttctcaaggccaaagagaaggcgaagagtgtggaaaatcatcatctgtcccgggcagcggagctctacgccttcatctcttcccctctccctgtgccgtcgccttctctcaagtgccctttcctggggtgggtcttcttgtagtcgggcgccttgtactccggcgtgtcgcggagccccagcttcgacaggacgaggcagtacgaatcccagtcggtcctgcgcaggtacttgaggtacttcttcctcctctggaccatgtcctgnagcccctttcgagagtgcttatcctttttgtg

SEQ ID NO: 9642 - DNA, 435 bp, Triticum aestivum
  unsure at all n locations
  Clone ID: LIB31-001-Q1-E1-B12
ggtacctgtcaggaattgncggctcgactcccacataaaacgattgctatctcatcgaaacatcaggacaccttcgcctctatcaagtggtatcagatttccaggttgctcggtgagattttatagtttttcatagtttagatcgagtttgttcttcatacctatagtccacgaaaaaagccaaaaaaattagggttagttcatcctatccgaaccaatctgagcctttgcataaccttttgtgtatttgccttgttcaatttgcggttgcatcgtcgtgtccagttgctggtcttagcgtctagtcctttagagtttcgagttctgttcacaggttgtcacgtcgccgctgccatatatcaccactgcatcatcatcatcgctgctgccatataccaccaccacagcatcttcatcgtcgctgccatataacac

SEQ ID NO: 9643 - DNA, 444 bp, Triticum aestivum
  Clone ID: LIB31-001-Q1-E1-C10
ggtacctatcaggaattcccggctcgacctcacaaccaaaaccggctggtggaagcgggcctgtcgccggtattaaaggagggccagccccaggtgtggtcgtaacgaaaccactgaacccgatgagagctgtgaagggtgctccgtcagctcttgccgctaacaagagaaaaagagaggacaccaagaagcccaaggtggttaccaaggaggaggaggcggcactcagagcgcgggaagcagctcggaaaagagtggaggacagggagaagcctcttatgggattgtacaagacgtactgagttgtcaatgctcccaagctcaaggtgcgcgcccagtcgcgctaaaacagtggaaatgctgatggatggaattgctctgaaagtaaagattgggagaacagcgccgagccccgagctcttgagcgtcagtgacacatacatg

SEQ ID NO: 9644 - DNA, 157 bp, Triticum aestivum
  Clone ID: LIB31-001-Q1-E1-C5
ggtacaagtctagaattcccgggccgactggtggtggaggaggagcgtggcaatcccgtagggcttcgccaagcaccatgggagaagaggagtagggagaggggcagggctgcaccaacgagagatcaaatcatgtgttatgggcaagagatggtgg

SEQ ID NO: 9645 - DNA, 445 bp, Triticum aestivum
  Clone ID: LIB31-001-Q1-E1-C6
ggtaccggtctagaattcccgggtcgacggagaagaaacagttgaacacgatgcgggagatcaaggtgcagaagctcgtcctcaacatctccgtcggcgagagcggcgatcgcctcactcgagctgccaaggtgttggagcagctgagcgggcagtcgccagttttctccaaggcgaggtacactgtcaggtctttcggcattcgtcgtaatgagaagattgcctgctatgtgacgatcaggggtgagaaggcaatgcagcttctcgagagtgggctgaaggtgaaggagtacgagctcttgaggaggaacttcagtgacactggttgctttgggtttggtattcaggagcacattgatcttggcatgaagtatgacccatcaaccggcatctatggtatggacttcttcgtggttctgggaccagctggataacgcgtctcccg

SEQ ID NO: 9646 - DNA, 373 bp, Triticum aestivum
  unsure at all n locations
  Clone ID: LIB31-001-Q1-E1-C9
gacgggtctacaacattcagatccgtatgtattttgcaaatctctgtgtctccctctttgacttgatcacggacggaattgaagcatctcttgatgtgtttggttctcttgtgaaatctggattccttcgctaaggcaattgctcaagtattgtcacaaaagattttcattggacccattgcactaggtattacacctagatcggatatgaactccttcatccagactccttcatttgatgcttccgaagcagctatgtactccgcttcacacgttgtcacaccctagctagttcaagcattagagtgtgcatcatgtttaaatttctcttaaatttgaaatggggaaggcanaaacccccaacaccccccct

SEQ ID NO: 9647 - DNA, 434 bp, Triticum aestivum
  unsure at all n locations
  Clone ID: LIB31-001-Q1-E1-D10
ggtacctatcaggaattcncggctcgaccgagaagacaacagaagggggcctgatcccctttctcactccaaaattgctgccgccggtagctcccatcagcttgattccttgattcagtgccttgagcttgctcgtcctcacctacagccagccccgcagcttgattcatttgtgcagccatagggtgaccttcgacggcggctggtttgtctcctgatctcctcgtacgcctcctcggtctcctcctaggctggtaaatggcgatggagaggtagcagggcccaaggtgtagctgcgcaagggaggaggtgagatcatcaatctgcacgatgttgttgctgtctatgtccgtgcaggtgatgttggcgtggatttcgtctccaacagctgctttgatccatctttagtatgaggatggtggagatgttttctg

SEQ ID NO: 9648 - DNA, 439 bp, Triticum aestivum
  Clone ID: LIB31-001-Q1-E1-D11
ggtaccgatcaggaattcccggctcgacagagaggtcaagagaaaggcgtgcacttgtgtttctgtagtggcttgcattggaatttggaactggctagcgttggtacttggaatgttttacaggagatgaagtgttgcttggatattcccttgactaatactatttattgccatttaagatatgttctggggccccaaaaatttaggggccctgtgccatggcataggctgcacctgcctgccatacgggcctagtataataaaaactttcatatagagtgcattaaatactatgagaagtttgatacttgatagttgttttgagatataaatatggtaatattagagtcgtgctagttgagtaatagtggaattgagaaatacttgtgttgaagtttgcaagtcccgtagcatgcacgtatggtaaacgttgtgtgac

SEQ ID NO: 9649 - DNA, 440 bp, Triticum aestivum
  Clone ID: LIB31-001-Q1-E1-D12
taccgatcaagaattcccggctcgaccagttagtcaaccttgcagaggttcgttctcctggaaaacccaccctttattctctcctaagtacgatggagttctcgaagaaaggaggccgacttcatcatgatgacctgaagcagagaaatgaagacatcaacgtaatgaatcgacctcttcgaggagagcaactaagaccgagaacactcactagaatttcgtaaccagaaccttccccttacgcatcttaaatcttaggacgagatttcttgtagtagaggagaattctgacaccccgatagttaagctacagtaaaccactgttaatgatgccaggtcatcaaaattaaaattttgctaaaccttgcttgtttcaaattagttcaaatacaaattcaaataacaaatcaaattatagtttcataaaacaatgaattaca

SEQ ID NO: 9650 - DNA, 448 bp, Triticum aestivum
  Clone ID: LIB31-001-Q1-E1-D6
ggtaccggtctagaattcccgggtcgacggagaagaaacagttgaacccgatgcgggagatcaaggtgcagaagcttgtcctcaacatctccgtcggggagagcggcgatcgcctcactcgcgctgccaaggtgttggagcagctgagcgggcagtcgccagttttctccaaggcgaggtacactgtcaggtcttttggcattcgtcgtaatgagaagattgcctgctatgtgacgatcaggggtgagaaggcaatgcagcttctcgagagtgggctgaaggtgaaggagtacgagctcctgaggaggaacttcagtgacactggttgctttgggtttggtattcaggagcacattgatcttggcatgaagtatgacccatcaaccggcatctacggcatggacttctttgttgttctggagcgagctggataccgtgtctcccgccg

SEQ ID NO: 9651 - DNA, 453 bp, Triticum aestivum
  Clone ID: LIB31-001-Q1-E1-D8
ggtaccgagtctagaattcccgggccgacgtcgaggtaagacgaaggaacctacactatcatcaatgctgaagaagaaagttaccgcaaaagataggatttcagggaggcttctaaatggtcgtgctagggacgcaacaataagagaagcttctaatactgaggatatgacctacagggaagcattcccaaatcagtggcagtgaaagcaccctgagtaggtctttcttcataattaacagttttgttttgctgtgctgttgcatgcttgaagtgcttgaagtacgcggggcactgaagctgcttcgaacccgtgcatggaaaatttcagaaaggaaagtcgtagaccatttgtattggcagtcggattgagaatccaaatcagaacaacgcgacagtaaataagcactcgattttgtgaacatgccaagcagtttgtccttgttgcccgacg

SEQ ID NO: 9652 - DNA, 173 bp, Triticum aestivum
  Clone ID: LIB31-001-Q1-E1-E4
catcatctcatcgaaagacgggacacctttgcctctatcaagtggtataagatttccaggttgctcggtgagattttacattttttcatatcttagatcaattggggtcgtcatacctaactcgagttgcagctctatacgatcgatgcttattgtacacgtgcatgcgacgt

SEQ ID NO: 9653 - DNA, 456 bp, Triticum aestivum
  unsure at all n locations
  Clone ID: LIB31-001-Q1-E1-E6
ggtaccagtctagaattcccgggccgacgtaggcgggatgatgacatcggctcccatgacattgtgtggcgtgaggccaatggcgacatagggcgtcgaacaatatacggaacgactgatgcgcgcgagatagtgcggcataccggatcgccctaaaacgacggcctttatatggaccaaactgtaaaacctgccgtaccaaatattgttgtcgagtagaaaatactgtttgaaatattataaatatgcgcaacgcgaataaccaaaacaattacacctgaggattcatccgacaacgtccaaaccaatggaggatgaggctataatgctcgtgggacgtcctgnccggagtgcctgaagactacgttgggccgaatagtatacgaaacgaccgatctgaacacgagggttcttacgcataggtcggctcgcccgattgacacagatggaaaacca

SEQ ID NO: 9654 - DNA, 367 bp, Triticum aestivum
  Clone ID: LIB31-001-Q1-E1-E7
attcccgggctgacggggggatcaatgagaggtccacaaagcagtttatctgtgaggaagcttgccgggtcaaggttctgtggtgtttcgtctccttctccgacggcgtcttcgccgccggcggctcgtggagacgatagttggcgtttttgtggaggggtctccaaggtcttgtttgtaatttttccttttatggggtcctttctgcaaagtgtcaggacatctggtgcttctggagcattctggctgggtctgtctgtgtgtgggtgtaactatgtatcctgattgttttattaaatgacagatggtaccttctcaaaagaagaatggttgccaacattttccctgcctgattagtcactccctg

SEQ ID NO: 9655 - DNA, 427 bp, Triticum aestivum
  Clone ID: LIB31-001-Q1-E1-F10
aattcccggctcgacagggacgacaaaggggtgttgctccaaatcttcaccaagccagtgggggacaggccaacgccgttcctggagatgatccaaaggatcgggtgcatggagaaggacgagagaggggaagagtaccagaagggtggctgcggcgggtttggcaaaggcaacttctccgagctgttcaagtccattgaggattatgagaaatcccttgaagccaagcaatctgctgcagttcaggcatcataggatagaagctggaattggagccggagaagctgatccagtgctttttatcatggtctcatggagcaaaagaaacaatgttcattgtaatatgcgacgcacaattatatccgatgttataattggtgaagctgaagacagatgtatcctatgtatgttgggtgtaatagatggt

SEQ ID NO: 9656 - DNA, 348 bp, Triticum aestivum
  Clone ID: LIB31-001-Q1-E1-F6
attcccgggccgaccccgaaacagcgccttcttgttgccatgctttcggaccagaagtttatttcaaattacctgaaagttaacagagagaggctgcgcaaggcgtacaatctgctcgttgatgctttgaaacaggtgggcatcgagtgcttcaagagcagcggagggttctactgctgggcagacatgagcaagttcatccggtcttacagcgagaaaggggaacgcagtctttgggacaggctgttggaggaggcgaatgtcaatgtcaccccaggttcatcttgccattgcattgagcctggttgggttaggtgctgtttcacaacgttgagggagcaggatatt

SEQ ID NO: 9657 - DNA, 442 bp, Triticum aestivum
  Clone ID: LIB31-001-Q1-E1-F7
gaattcccgggccgacgaggccttcatcgctaagtatgatgtgaagccgaacaatgccattcttgccgaggacaagcacttgcccatgtacgatgagttgtccagcaaggacaatgttgaatatattgctggaggagccacgcagaactctatcagggttgcccaatggatgcttcaaactcctggtgcaacaagttacatgggttgcattggaaaggacaagtatggtgaggagatgaagagcgccgctaaagctgcaggagttactgctcattactatgaggatgaggctgctcctacaggcacatgtgctgtctgtgttgttggtggcgaaaggtcattgattgcaaacttatctgctgcgaactgctacaaatctgagcatctaaagaagccagagaactgggcactacttgagaaagcgaaatacatctacattgct

SEQ ID NO: 9658 - DNA, 403 bp, Triticum aestivum
  Clone ID: LIB31-001-Q1-E1-G10
ggtaccagttaggaattcccggctcgacggcagctaggccgggcaaggtagatgcagcagtacagctctgaagatggattggtggcaggtggctgtggcggcctcatacccggcaggcgtcctggttgagtagtgcgccggaccggtgggtgccccatactcggcatgcgtcctggttgggacctcaggtcttagatgttaggtttggctgcaaggtatgtctggtattaggtccagactatcagcatcccttcaacaactggatatgaatagcaacagatgttgcctagacggtggatttagtcttactgttgtattactttgtaaggtcttgtgtgaattattaataaagtggctgcatgcatcgtctaaatataaaggccaggggtctttctccttttct

SEQ ID NO: 9659 - DNA, 279 bp, Triticum aestivum
  unsure at all n locations
  Clone ID: LIB31-001-Q1-E1-G11
ggtacctatcaggaattcccggctcgactaagttagtagcttttatatagtgagaaatacactatacaccattttattcagtcctgggtgccaatcatatcacctgggctggaagttttgttgtactttttggtctgtagcatcacgagacttgtgtgtgtcgtgaacaatgcaatgatgcatgttttggctcattgttgatttcagcttaatgcttattatttggactaaaaaaaaaaaaaaacaaaccaacagaaaaaaaantcccatcaaggggac

SEQ ID NO: 9660 - DNA, 424 bp, Triticum aestivum
  Clone ID: LIB31-001-Q1-E1-G12
aattcccggctcgaccccgaaatgaaaggcatctacgacaactactctgtgaagcgccagatcgtcaattccggacccatcatcgcgtcgcagctgttgctagtggatgaggtgatcagggcagggcgaaacatgaggaaaccaacctaaacctagcgctcgccccttccaggccgagaagactttttgtttggctgtttttctctgtggggtgccgagtacgtagcgagtagtgatgtggtggggtggaatgcttgagtgcaagagattgtacttgtaacaaccctcgtgacagtttgtcgatgtgtttctacgctggtgtttgtatgcagaatattttcgtgttggatcaagttgagcagctatgtattttttgtgtgctggtggtgattggattcttgtttgtgttgagcaaagcctgcct

SEQ ID NO: 9661 - DNA, 463 bp, Triticum aestivum
  unsure at all n locations
  Clone ID: LIB31-001-Q1-E1-G6
ggtaccagtctagaattcccgggccgacgaggccttcctcgctaagtatgatgtgaagccgaacaatgccattcttgccgaggacaagcacttgcccatgtacgatgagttgtccagcaaggacaatgttgaatatattgctggaggagccacgcagaactctatcagggttgcccaatggatgcttcaaactcctggtgcaacaagttacatgggttgcattggaaaggacaagtatggtgaggagatgaagagcgccgctaaagctgcaggagttactgctcattactatgaggatgaggctgctcctacaggcacatgtgctgtctgtgttgttggtggcgaaaggtcattgattgcaaacttatctgctgcgaactgctacaaatctgagcatctaaagagggcagagaactgggcactagttgagaaagcganatacatctacattggctggcttttt

SEQ ID NO: 9662 - DNA, 444 bp, Triticum aestivum
  Clone ID: LIB31-001-Q1-E1-G9
aggtaccgatcacgaattcgcggctcgacgtcggtgctacgggagggaaggctgtagtggaagagctcaggaaactcacccagctgcgcaagctcggagtgtctggcatcaacaggcataacagcaaggacttcttctctgcaacctcaggccttgtgcatctggaatccttgctggtgcggctgggcaaggacagccaaggctgcctggacgaaatcaccctgccttgggagaacctgcggagcctcacactccacgggcttcaagacaagctgccaccatcaaagaacctcaggaagctcatgaagctggatctggagatggacgccttaaaggaagacgacatcaagttcctagccaacctaccggagctatgcatcctgcgtctccgggtcggacagcttcaggatggtaagctccattttcacgccgagatgtacgggg

SEQ ID NO: 9663 - DNA, 401 bp, Triticum aestivum
  Clone ID: LIB31-001-Q1-E1-H6
aattcccgggccgacttcataagtagtgagggttcaagtccctctatccccaaatcctcttttattccctaactatactatattattattatttatcctcttttttttctttttatcaatgggtttaagattcattagctttctcattctactctttcacaaaggaatgcgaagagaactcaatggatcttatcctattcattgaatagatttcttttttattagagtatcggcaagaaatcttggttattcactctatttttaagttttatttaagtaaaccatgcacaatgcataggactacccccccattttcaaattttaaatttgaaatactttaattaatttttagtccttttaattgacatagatacaaatactctactaggatgatgcacaag

SEQ ID NO: 9664 - DNA, 416 bp, Triticum aestivum
  Clone ID: LIB31-001-Q1-E1-H7
aattcccgggccgaccgtgtcctcgtcctcatcctcggcgctgccctcaaggttgtagtactcgtagtagtggatgcgctagagctcgcgttggtactccatcaccgattcctcgacggacaaactcttctctacctcgacctcggccacgcgcaactcctcctcccgacgctcctcgatctccgctgcctcttgcatctccagctctcgctcgatgatctcatgaggaagtaggtgctccatggccaccggtgcctttttggacgtgggttgcatgctggatttcgaggtggcctggaatatcttggcgtgtgcatcctcgatcttggcgggatgccctcgacactggccaaggcaacatcggcggcacggacgacagctcgagcgctgtcggcgtttgcatccatcgtcgcagc

SEQ ID NO: 9665 - DNA, 445 bp, Triticum aestivum
  Clone ID: LIB31-001-Q1-E1-H9
ggtaccgatcaggaattcccgggtcgacagacgacagaaggggatcgaatgtatcatcttacatcaacatggtttgcgatacattgaggaacacaattccgaaagccgttgtgcattgccaagtgaaggaggcaaaaagaaacttgctcaaccgtttctatgcgcatgtaggaagcaaagagaagaaacagctgagcgcgatgctggacgaggatcccgcgttgatggagaagagggattccctcgtgaagaagctggagctgtacaagtccgcgaggaacgagatcgactcggttgcatggaaatgatctgatctgatccgatagagcgtttgcggctggaacagatagaacatgtgtagtagagatgctccattcgttttgcatatgctttgtacacgggctttgctgccgagtgttgttttgtggctaacaccgagacatgg

SEQ ID NO: 9666 - DNA, 437 bp, Triticum aestivum
  Clone ID: LIB31-002-Q1-E1-A10
accggtcaggaattcccgggtcgaccccagtcacaccgatctggcagagtgatggtggtcgtggtggcggttttggcggaggtggactacgtggtggtggttttggcgaaggtggactcggtggtggtggtggttttggcggaggtggacttggcggaggtggactcggtggtggtggtggttttggcggaggtggactcggtggtggtggtggttttggcggaggtggactcggtggtgcttgatgtcgatgatgattccgtgtatgcggccgttgtgccatgcctttcatgttttaacttttatgatgtttcatgtcttgcactacttttatgttcgtgactttcgctagtgatgatctttagatgatgaacttgactatgtttaaatgatgatgatgaactgtcatatttcatattattctgctttgaaatgct

SEQ ID NO: 9667 - DNA, 459 bp, Triticum aestivum
  unsure at all n locations
  Clone ID: LIB31-002-Q1-E1-A2
cggtccagaaatcccgggtcgacgtatcatatataggcgccttctgtccaatgagtggatgacatctgtcccaacgatgaccgacacgtgtttcctccagccaatgatgattttacacgtggaaaatccccattggtcggggctgttaacgggttatcggaaacccgacccgatagcttaacggcgttccgttacggtggatgccgcgtgtcagtcacccttgacgaaagcacttctgtgacgcgcgatttatcgtcatggaagtggacacttccgtgatgataattttggtaatgtcatggaacacttctacgacagcacaggtatgactatcttgattctgtcataaatttgtcatggaggtacatgcatgacaaaaaaatgcgacctactgtgacaaacacgtatcatcacggaagtgtantttttttgtagtgcatgggtggccccgatgtcaac

SEQ ID NO: 9668 - DNA, 444 bp, Triticum aestivum
  Clone ID: LIB31-002-Q1-E1-A8
attcgcgggtcgacaagagtgaggacttcgaccgctccagcgctcccaaggatttccaggtcagcgggtggtaccaaggagcagacgacgattcagacaagcaaccacgcacgccgacaagcctaggagagttcacttacgacctcgagaagagcaacgcccagaccttccagctagacagaaccaccgccgacgcatctgtggtcaacattgtccggctcgacttctcctcgaaccatgggcagcctgagctgacgtgcatctaccgcttcagggtgcacggcagcgagcctggctctcttcggcaccgcggcatcgtgaggcctgatctagttagtacctgtgtgcctgggaccatacggtcttccctctttagccttgattgaagacttgaagcccctgcgagacggtaggttcaagttgattctaatctgtagcataatg

SEQ ID NO: 9669 - DNA, 439 bp, Triticum aestivum
  unsure at all n locations
  Clone ID: LIB31-002-Q1-E1-A9
acggtcaggaattcccggctcgactcccacataaaacgattgctatctcatcgaaacatcaggacaccttcgcctctatcaagtggtatcagatttccaggttgctcggtgagattttatagtttttcatagtttagatcgagtttgttcttcatacctatagtccacgaaaaaagccaaaaaaattagggttagttcatcctatccgaaccaatctgagcctttgcataatcttttgtgtatttgccttgttcaatttgcggttgcatcgtcgtgtccagttgctggtcttagcgtctagtcctttagagtttcgagttctgttcacaggttgtcacgtcgccgctgccatatatcaccactgcatcatcatcatcgctgctgccatataccaccaccacaccaacttcatcgtcgctgccatatnacaacaacacat

SEQ ID NO: 9670 - DNA, 418 bp, Triticum aestivum
  Clone ID: LIB31-002-Q1-E1-B12
accggtcaggaattcccgggccgaccaagcacagaaataagagaggacacttctctctattaattaattggctacctaacacaatatatgaaacaccttaattaaccatacaaaacccccaaatccagccccccccccttttagaaaaaaaacaaaaaccctagcccctgaacagctgacgcgtggatgcctattggcactagtagaaaagggggcaaaggtccaggccgggtcagcccattagtcccggttcagtccagaaccgggaccaatggggcattggacccggttcatgagcccaggggggcggccgggccacgtgggccattggtcccggttcgtctggaccttttggtcccggttggtgggacgaaccaggaccaatgggtctcgctcctggcccaccaccattggtccc

SEQ ID NO: 9671 - DNA, 438 bp, Triticum aestivum
  Clone ID: LIB31-002-Q1-E1-B3
cggtccagaaatcccgggtcgacaaaatttgttcagacaattatgaacattctgaagagactagctgatgagggggcagcgcccgcagccccagagaggcagagagagacggagctccaaccaaggaataatagttcaaacagcaacgtgacatcagcaggttcctccagcttaacctcttcagagaatggacctgaatattcaagcccggtagcacaatgatgagtggatccctagcttttagctgaaagctctactagctgtagctgcaacggtttgagcctaggagattgaagtgccttgcggtttttgtacgctcgcttgcccttcccaacctgatgtatgaaaattatgtggaagagtccacagctgttatataaggaattttggggctgggaatcgtttgtaagaaacattgtagaacaacttccgtttcac

SEQ ID NO: 9672 - DNA, 444 bp, Triticum aestivum
  Clone ID: LIB31-002-Q1-E1-B8
attcgcgggtcgacgagcatgtgcagctgggtgctgttccattcccgagcgatgttttgaggctgcagaagcttggagtttgtggtgtggtcacactaaacgaatcatatgagaggcttgtttccaagtcactgtacgaggctcatgggattgaaaacctggtgctaccaactagagattacctttatgcgccatcatttgacaacctttgcaaggctgctgacttcatccacagaaatgcttcatgtggtaagctgacttatgttcactgcaaagctggacggggacgtagcaccaccgttgttctttgctacttggtgcaatacaaacaaatgacacctgctggagcttttgaacatgttcggtcatgcaggccaagggtgttattggcttccgcacaatggaaagctgtccaggaattctaccagcttagagtgaagaaaa

SEQ ID NO: 9673 - DNA, 408 bp, Triticum aestivum
  unsure at all n locations
  Clone ID: LIB31-002-Q1-E1-C11
accggtcaggtattcncggctccacttggatctcagcagtcatttggatatgcttgttgatatgcttcggaagcatcacaacatgtggctacattgtggttcaacttctccaagtgtcataccaagacccagtctaccatctgctactgaactcccatagcaagaagacctgaaaactcattgaagggatatgttcttggtacacaataatgtcccctctgttcataaaggtgccacaataaagggtataccagagtagcaattagagaagttttttctttgtggaatggaatgatttcttaacgaagttgaagctccttgttatggtgtcaaaggtggttttctaattgtatatcaaatttaattgcttggcagatgatagacaacagatttttcttttttacgaat

SEQ ID NO: 9674 - DNA, 419 bp, Triticum aestivum
  Clone ID: LIB31-002-Q1-E1-C12
ttcccgggtcgaccccgccctcactagacattctccgcacgctttagccgtccgctatacactggagcttctggaggcctgcgctgaatatgcccaaaccatctcaaacgatgttggacaagcttctcctcaattggtgctaccccaactctatctcgtatatcatcattccggactcgatccttcctcgtgtggccactgtaaaacaaaagatactacagtgtaaaaatactttgagaattacactataaaatcttttgataatcacactgtaaaactttgagagaactcactaaggaattagagtgcaaaatcttttgtgaattaccagtgagatacagtggggaaactatccgtgtagtaaagaaaaattaccagctcattacggatatctctgtggtatgatgagttctctccat

SEQ ID NO: 9675 - DNA, 363 bp, Triticum aestivum
  Clone ID: LIB31-002-Q1-E1-C5
attcgcgggtcgactctgagagagaatgggcctatcgtcaaataacggagatcgagaccacgaaacaccacctcttttacctgctcgcagaaatggacaagagatacccgggccgtagatacacgtcaaataacaaggagctgatccaccatcttttcaaacacgtcgaggctaaccccagcgatcccctctggcgccacactctcggaagagaaagactcaataattgtgtgatatatggaatgccaacgctgatggccacttggttgtatttggactgggagggttggaaaatatgttcgctttcttacttggaattgggcactagttttctagctcaatctcttgagtctagatgatgct

SEQ ID NO: 9676 - DNA, 445 bp, Triticum aestivum
  unsure at all n locations
  Clone ID: LIB31-002-Q1-E1-C7
attcgcgggtcgacttacgtataaaattaggatatgtcccctcatgtgccagttttgagatatcttagaagttcacgatctggttttagttcctgcatctttttccacctttctgtagagatttgagtaaaacttaaatgtctagatgcatataagcttgtgagttaattaatgctaacttgatggtccaaactaaattctgcaaatatgaccatgacagaaagataaatggaggtttagaggcagagtggatgcctgcaccaactttataggttgaactacgttttgctagatgactcanatttcagaacacgagcattaatttttgggaatgcagttaacaacagaatcaagtcaagatgaaaaatggagaactattcaatattgagtttaattcccttcttgcagagcaacagagatgagtgaagagattattaaatattga

SEQ ID NO: 9677 - DNA, 224 bp, Triticum aestivum
  Clone ID: LIB31-002-Q1-E1-D10
accggtcaggaattcccgggtcgacagacacaaggtcgtcgatgatcgtcagcatgatctggagcttcttgatgccataacccacaggcataagcttagatgcaccccaggtgagaccctccatttgaacactgcggacagcctcctccaacttcttcatgtcagtctcatcgtcccatggcttgatgtccatgaggacggaggatttgccactttctttcttc

SEQ ID NO: 9678 - DNA, 439 bp, Triticum aestivum
  Clone ID: LIB31-002-Q1-E1-D11
accggtcaggtattcccgggccgccgacgacagaaggggcagggcaacttttcaagtggcatttcctttataatagtaggtgatgttggaccagccgacgaaccctagctactatacatggggagttggggagtagtcgcatagaagaaaacccgcatgcagcaacctggggagctggaacagtacaagaagttatacctcaggtgggcgagatgtcacttaggcgggtgggcgggatcttcccacagaacaagggcgcagaggacctttgtccgcgccagcgccggctccgagtggacggtgcacaacggcttcctccatcgtcgatggtaacaacgtcaacgctgcacctcctcacctcccgcagcggacggaattcggccggatctgtgaccaccgatgaggagagagatagagtggacactgtcatcttgttttg

SEQ ID NO: 9679 - DNA, 461 bp, Triticum aestivum
  Clone ID: LIB31-002-Q1-E1-D8
gtaccgatctagaattcccgggtcgaccgacagaaggagctataagttcggggtgccacacttgtgaaagtgttcggagtttatcacaccataattttgggatacttaagcccctggtgcattggccgtaccaaagtgtacggttgcaacatgtcgtgaaatgaacatatgtatatatataaagcaattaaagcaataataagcaagagctatgtattgtttattcaaaaaggtactgcaatggaagcagaacgatacaaatagtgcggtaagcaagggatgagactatctaacatgtccccctctaggggtaagctgcgggatggtatgtaaaacaggtataatgctcataacagagaccacccgagcacttgacgtggccttccgcttccctggctgttgtatcgtgagttcggcgattcaagtgccggacaggactgttcgaagacggagtcctgaaa

SEQ ID NO: 9680 - DNA, 423 bp, Triticum aestivum
  Clone ID: LIB31-002-Q1-E1-D9
cggtcaggtattcccgggtcgacttgttctgtatgagtaaatatgttaacctagtatccatgattcaacccattatgattaaacatgtttgcaatgacgattagagattatagtttctcatgccatgcataagtagctaggagtgaataatgatttatcttagatatcaacatagcgttaaaatgattgtgatctagtatgatgatatggcatcctcctctgaatgttcgagtggcttgacttggcacatgttcacgcatatagttgaatcaaaaccaacatagcctctatgatatttatgttcatggtgttcatatcctactcatgctagtgtccaatgttacttatgcataatgcatggttatgatcattgttgctctctagttggccgcttctcaatcttaattgctaaccttcgcctgt

SEQ ID NO: 9681 - DNA, 334 bp, Triticum aestivum
  unsure at all n locations
  Clone ID: LIB31-002-Q1-E1-E1
ccggtccagaaatcccgggtcgacagagaccgggacctgcgagaaggccaagatcacgatgcaccgagtggttccgtacgtcaggtcccgagtgctttagccgttacatacgagcagctgagattcccaacaacttcaggttggccacggggatcagcaaattcactagcgagtccaagcctgagatatggctagaaggttaccgaatagcagtctagatcgacggcggcaacgacaatgtggccatgaagcatgtcncgctgatgctagagggatccgctcgagcttggcttactcggctcccgacaggcagcatattttgttgggatgacct

SEQ ID NO: 9682 - DNA, 442 bp, Triticum aestivum
  unsure at all n locations
  Clone ID: LIB31-002-Q1-E1-E10
accggtctaggattcccgggtcgacttccaccaaagcgatatccatcatctcatcgaaagacgggacacctttgcctctatcaagtggtatcagatttccaggttgctcggtgagattttacagtttttcgtagtttagatcgagtctgttcttcatacctacagtccacgaaaaagccacacaaaaaaattagggttagttcatcatatccgaaccaatctgagcctttgcataatctttttagggttttgctttgttgaatttgcggttgcatcgtcggtctagttgctggtcttagagtctagtcttttagagtttcgagttctggtcataagttgtcacgccgccgccgcaccatcatcatcgcccctgccatctaccaccaccgcttatccgccaccgctccgaatccgtatccatnnatacacaccgattcatatc

SEQ ID NO: 9683 - DNA, 198 bp, Triticum aestivum
  Clone ID: LIB31-002-Q1-E1-E11
accggttaggaattcccggctcgacaagctcaccaccgacaaccgggtctaccacaaggcctgcttcaggtgccaccactgcaagggcaccctcaagctcgcgaattacaactccttcgaaggagtgcccaacggaaggccacactttgaacagctctaaaaggagccggagactgtacaaaagcttttaaagcgcac

SEQ ID NO: 9684 - DNA, 441 bp, Triticum aestivum
  Clone ID: LIB31-002-Q1-E1-E4
cgggtcgaccaggacatcaacaacaacgacaaacatatgcagctatcttcccttggcctggccagctactgcgacggggatcgtgacggcatcgccgatgggcgacatcaccggcgatgacaacagatgcggcttcttcatctcatcatcgacgcatggatattcttgtattgatttccatgcattcattgtaattgatatctcacgagctagttcaatgaaacagtataatccatccatgcatgccatggcgaccaagatggaggcatgcgcattgctagcgtttccatcatcaacacacatcggcgctcacacgcgtggcaatacacagccgcggttcttgctgatgtgcagaatacacatgcatgcgtgcgtacctgacatgcatgcctaacatattgttttattttacatgatacctaacatgttgttggttgtgac

SEQ ID NO: 9685 - DNA, 442 bp, Triticum aestivum
  Clone ID: LIB31-002-Q1-E1-E7
aattcgcgggtcgacggctcgaaaaaacgacagaaggggtccacatgtatagcaaatctggcaatcttgaacaagccacgcgggcgtttgactttatccaaaaggagggcctccaaccagatacgaaactctttacatcaatgattagtgcctgtattaacgctggagatccgaaacaagcagagaaattggtaaagaaaatggatgagctttccatgaaacccagcagggaaatatacatggatgtgatgcgggcatatgctgagcgtaacttagtagatggagctcaatcggtgaaaacaaaaatgtcatttgctggaatcgagcccccgttggagtgcttcacattgcttatagaagcaaatggacgggctggcaaccctgattatgcatatgaagcgtttgaacagatgaagaagaatgggcatgaaccagatgaccg

SEQ ID NO: 9686 - DNA, 453 bp, Triticum aestivum
  Clone ID: LIB31-002-Q1-E1-E8
gtaccgatcaagaattcccgggtcgacatacaggtagagcgaaagatacctgagataccatgaacgcgtataggtcgagagagatagtcctacataagcatgactgataactatatgatatgaatatctggattaaaggggattcaactatttaaactggagatcacgacatcgataatatcataacgcacatctggtgtatcaaacagtgcatatccatttgaatttgggcacatgtgctaatgttatatagtttatcaatattggtgatccatagattcttcaattacatacaatgcatggtttatatgcagttaatgtctacactggattacactatatgttgcatgtgtgaaacacattagacatgtctgagaagtaaaaaacccgcatgatacacacattaattggcgacacttatcgaggaatgcatacattggatttcaacataaa

SEQ ID NO: 9687 - DNA, 444 bp, Triticum aestivum
  Clone ID: LIB31-002-Q1-E1-F1
cgggtcgaccagcttcctgaatatagttcagttgaactcgatgtttccgtctctgaatcaaaaaatgtataattagttccatatagtgcgcaatggattttgaagcatttaagctgtttggcaagtctggtggcatacactcagtgcagtgtatgctttgaagaaagatataggcacctggtggatgggaagtgcaaatgagatatgacttggcaactcaacaagacagttttggggaggattataacattacagagagatgctgagttagtgcactcatagtggaagtgtttgattatgacattagcgacatggtagttgctgagttagtgttgtcaaattgtgaagtgtcaagaggtgtggggaagtcatttcttcaagcagacaaggacaaaattcaagaggctgatgaaacagcacatgatgatcacatacaggaagcac

SEQ ID NO: 9688 - DNA, 435 bp, Triticum aestivum
  unsure at all n locations
  Clone ID: LIB31-002-Q1-E1-F10
cggtcaggtattcccggctcgacgtactccttactggctgggagatggtcatggggacgattgtatggcgtccagataggctctcccacaaagagccgcattgccttgatgtagttgtcactatccaatgtaaagcggtgatacattcctgcaggcaaaacaatcatgccacctttcttaactgctatacggatccactgttcgttttggtccctcacatcaaagtatccactgccctcgagacaatagcgtatctcttcatcagtatgcaagtgctcttcaaagaagttcttcagcttggcctcatagtttggcaacttctctggacatacgtcgcaaatgtccacataagagtatcccctggcctcacggattttcttgagattctcgtctttctcncagtcatcagcattcagggttcagcttacaacacca

SEQ ID NO: 9689 - DNA, 442 bp, Triticum aestivum
  unsure at all n locations
  Clone ID: LIB31-002-Q1-E1-F12
accggtcaggaattcccggctcgacatcgacatcaccaagaagcataatgctgggacaaacaaagctgctcatagcaccacatcgctcaatacaaagaggtttgatgatgatacagagaatcttgctcatgagcgtgtgccgtcagacctgaagaagagcattatgcaggctagaacggacaagaagctcacacaggcacagcttgcacagctgatcaatgagaagccacaagtcatccaggagtacgagtcaggcaaggctatcccaaaccaacagatcatcggcatgctggaaagggctcttggcacaaagctgcgaggcaagaagtgaagccgcgtgcatctgacaggagtcgaggctttcaagagagcttggctgggcaangtttacgctaaataaagcttgtctactaaatcatgcgacttaaganaaccctggagt

SEQ ID NO: 9690 - DNA, 457 bp, Triticum aestivum
  Clone ID: LIB31-002-Q1-E1-F6
gtaccgatctacaattcccgggtcgacacttccccacaaagagacgcaattttgactgtacaattttgattatacagtttttatacttccgagagaaaaaacgcaattgtgattatacttctatactttccaatagaatgacgcaattttgatatttccccataaaaaggttaaattttgaccaagaattctgatcatgattcctacttctttttgctcctcttttttttttttttgcggtgctgttgtaagaggatctatttgtgctatataaaggaaaaaaaaaggagcatgaggacgaactcaccatcatgtcgagggaggatttgccgaggccgttctggcagccgtttgcctgggaagagagctgatcgtctcctcttcaaactgatatataggtgctggggtgccgccagcaatggaaactcggagactgaatccgaaagagggcctgttt

SEQ ID NO: 9691 - DNA, 457 bp, Triticum aestivum
  Clone ID: LIB31-002-Q1-E1-F8
gtaccgagtctagaattcccgggtcgacacgcagatctatttcccgtcatctttgaccgtgacacgtgcatgccttgtagggcgcggtccacatgcttgcaggcataggaacaaactctttgttacctagctccgtctttggcttggcacttgaatctgctggctaatcaccctcagccaggtgcttatgtttagctagctagcatttcttctttgaaatggggttctaaaagatggttaggctctggctaggggcctatggttacgtgtccttttttgcgggtcacatcggccggaagcatggtatgtgtagctagcctgcttctgcttgtaacacatttcagataattgtgcgtgcagtgtacagaataaagcacgacaaatatatatacatatgtgcatacaagtgggtgatggatacgtgtcgatccatgcgtatcggtcctaatgagacgcg

SEQ ID NO: 9692 - DNA, 437 bp, Triticum aestivum
  Clone ID: LIB31-002-Q1-E1-F9
cggtaaagaattcccgggccgaccttggatgcagtgatgagatactgactattatagcgatgattcaaacggggaatattttctataggcctagagaaaaacaggctcaagctgatcagaaaagggccaaatttttccagccagagggagatcatcttaccctacttgctgtatatgaggcttggaaagcaaagaacttttcagggccctggtgctttgagaactttgttcagtcaagatcgctaaggagagcacaagatgtcagaaagcagcttctaactatcatggatagatataagttggatgttgtcgctgctgggaagaacttcatgaaaataaggaaagcaatcactgccggcttctttttccatgctgccaggaaagatcccaggaaggctacagaaccttggtggagaaacagcagtgtacattcaccc

SEQ ID NO: 9693 - DNA, 439 bp, Triticum aestivum
  Clone ID: LIB31-002-Q1-E1-G10
accggtcaggaattcccgggtcgacaatgtttgtaaattcaactgctcttcctgtgcatcagccatttgaattggtgatggataaatttggagtgaaaacaaggtcttcagagcagacaatgctacctattgaagcagatatcttgctggttacagatagctcttcaaatgaggattcagaggcagatgaccagtcctattatccccttgaggtgtatgctcaaacttggcagggttatattactcatatcatgcatatgttgtattgcaatgcttagttttttcatcatatacacgatattgaataccatctccttagtagacacatcatatatgcgattgccctcttctcacttccttagtatataaatcatatatttgaatcatatcatgtagcgaccagacctcaaacagtctgatctctgtgctccggtgtcat

SEQ ID NO: 9694 - DNA, 300 bp, Triticum aestivum
  Clone ID: LIB31-002-Q1-E1-G11
accggtcaggtattcccgggccgaccgagaagacaacagaaggggctatattcagtgtaatgtgcaattaatatcttcatatatgaatccgtgcttgcatgtcacaaaaaaaaaaaaaaaaaaaaaaaaaaaaaaaaaaaaaaaaagaaaaaaaaaaaaaaaaacaaaaaaaaaaaaaaaaaaaaaattaaaaaaaaataaaaaaaaaaaaaaaaaaaaggggccgcccaaaaggttcaaaccttacttacccgtgcatgcaacttcaaacccctccaaaagggcccccaaaatccaatt

SEQ ID NO: 9695 - DNA, 436 bp, Triticum aestivum
  Clone ID: LIB31-002-Q1-E1-G5
gacgtggcataggagctttcttcgtcagaactgacaccatcttcgtcagcaagggatactacaatacgaggcccagaagagagtacatcgtcttgcctacttgtcagcagattcgagtcagtgctatttgatgtacttctttgccagatttttgaagaattgccagtgctttgtgtaacggggctgagctttatcttgttatcctctatcctattctggaaaaaaagtataacaatcagaagaaaagaacaacatgaacatctgataacaaaaagtactgagagaaatacagaatgtgtgatctcaaagcaccttaatgtaagtaaaacgatctgctgtaactttcttcttcaacgagtcaataacacgtaaaatgtgccgggaggcctcacttctttcttcttctgacatattagccttactatcttgactcttg

SEQ ID NO: 9696 - DNA, 456 bp, Triticum aestivum
  Clone ID: LIB31-002-Q1-E1-G6
gtaccgagtctagaattcccgggccgacattgcattaaaatgattgtgatgtagtatgatgatatgctatcctcctctgaatgtttgagtggcttgacttggcacatgttcatgcatgtagttgaatcaaaaccaacatagcctctatgatatttatgttcatggtgttcatatcctacttatgctagtacccaatgttagttatgcataatgcatgttcatgaccattttccctctctagctggccgcttctcagtctaattgctagccttggcttgtacaaagtgggatttctgcttgtgcatcaaaaccctgaaacccaagttattccagatgagtccaccatacctacctatatgcggtattaccccgccgtcctaagtaaatttgcatgtgccacctctaaaaacttcaaataaatatcctttttgtgcgcctagattgttcatagagcga

SEQ ID NO: 9697 - DNA, 445 bp, Triticum aestivum
  unsure at all n locations
  Clone ID: LIB31-002-Q1-E1-G8
aattcccgggtcgacaacgattaaaatagtgtcaggaaacattttcgtgatggctaagcaaggaacggcgcgatctcccgcgatttcatgaaccgtgctaattgcgaggcagattttattcagagatagcgcggctgttttgcctgcggttcaaaatcgtggcagttgatctgtttgctctacgctgatgggagtatttggcaatgttaaaagtaactgtcgttctgtactgtttaattagcagtacagcggtacttcctcacagaaaaaaggacgtgcataccaccagcaatgttcaactcctttggaccgtctttagcaaaaccaattactttcagattttcacagtgtaaaacgcacaaacgcaagaggggaggattgatttcattctgcaagactgcaaccacactgnaaggtgcacaggatctgctccttccacaccagg

SEQ ID NO: 9698 - DNA, 379 bp, Triticum aestivum
  Clone ID: LIB31-002-Q1-E1-G9
ggagaagaaagttaccggctccgacatgccattaaaatcgcatactcccgttctgcacatccctgctcttcctgagggcaccgtcgtggtctcaacatagcaagaagagcggcacggctggatcggcgaaagagatggcattttcctctgaccacactcacccttgacattctcccattgaaagatctgcggtttacttcagctctggcaccattgagggtgtgcgctaattttctttggcaaaggctgtagcttccagagtgctaatgcgaaagcctgagacttgaaagtgttattgcttcccttgtgataccctaataataaatgcatttggcgacttaagcacttatgcgccgctgaggtgtgatgctttgcttca

SEQ ID NO: 9699 - DNA, 419 bp, Triticum aestivum
  Clone ID: LIB31-002-Q1-E1-H10
ggtcaggaattcccggctcgacaacgattaaaatagtgtcaggaaacattttcgtgatggctaagcaaggaacggcgcgatctcccgcgatttcatgaaccgtgctaattgcgaggcagattttattcagagatagcgcggctgttttgcctgcggttcaaaatcgtggcagttgatctgtttgctctacgctgatgggagtatttggcaatgttaaaagtaactgtcgttctgtactgtttaattagcagtacagcggtacttcctcacagaaaaaaggacgtgcataccaccagcaatgttcaactcctttggaccgtctttagcaaaaccaattactttcagattttcacagtgtaaaacgcacaaacgcaagaggggaggattgatttcattctgcaagactgcaaccacactga

SEQ ID NO: 9700 - DNA, 422 bp, Triticum aestivum
  unsure at all n locations
  Clone ID: LIB31-002-Q1-E1-H12
cccgggccgccagcttccctgtggataagttcttcctccattcgattacatatttgacatgtttcacgtgaagaagctggattttacgtttgtccgcctttatgccttgcacatgaactacatcattggggttgagcagatacgtcatatctgtgtcgctgacccgtactacatgcacgagagcttcttgggagtctgcgcagagcaacgtgaatacgtgagggattacatcgtcagtttcatgctcgccaataaggacaaggaggcgattctcgtgccttatcatcccatgtaagtcatccacgctgctatccttccttcgatttcaataattcatttgcacggcggaggctaattaatttgaggtgtacttattttgcgcagcggcgggtgcgccgtcctcatcatcctctanccccgat

SEQ ID NO: 9701 - DNA, 437 bp, Triticum aestivum
  Clone ID: LIB31-002-Q1-E1-H6
attcccgggtcgacggtttccttcaaggacctggttctttctgtccacatcaattgttgtcattggagtgcttctgttctgcggttctggctgtgcatgatctccagtggcttgatcttcgtttctctcatgctctgctggctgctgcttcttggtcgtagtgagatatgcatgtaatctttcggtttttgtcaagtttttgcctttgtaatttagcatcattgtatcctaatcggttgatggcttcattaatttgaagtcgggcctttcgtgcctttttttctaaataaagggaggagccatgcagaaaccaccctcatattttagttaacaaccagcagtacatgtagaaaataatgttttattaggaatattaaaatggtttaaacatatacccatatagtttaaaccctaactccaattttgacagattatat

SEQ ID NO: 9702 - DNA, 437 bp, Triticum aestivum
  Clone ID: LIB31-002-Q1-E1-H7
ggtcgaccgagaaaacgaaagaagggtgatatgtgttttgcttggagcgtcgtgtattatattagtctttgctttttagtttaccacaatcatacttgctgcacacaccttttgggagaagcctatttgattagaatttgctaaaatactctatgtgcttcacttatatcttttgagcttgatagtttttgctctagtgcttcacttatatcttttagagcacggtggtgtcttaattttgaagaaattgctagtctcttatgcttcacttatattattttgagagtcttttagaacagaatggtattttctatgatcataaagttggtcctagaatgacgagtatccaagttgggtataataaaaactatcatagaaaagaattggatgctatgatcaatatgatgctcgataattgttttgagatatggaggtag

SEQ ID NO: 9703 - DNA, 182 bp, Triticum aestivum
  Clone ID: LIB31-004-Q1-E1-A1
ttcagttttccgcatcagcgtctaatagctgcaatgcagttgctaatcaggtactcttttatggtcgaggtttgtgcagaatagatagatcatacagtccagtatgagaaataatgcatggcttaaatgcaatcggccgccctacaggatcaaaccatatgtacgcttgcatgcgacatcat

SEQ ID NO: 9704 - DNA, 433 bp, Triticum aestivum
  Clone ID: LIB31-004-Q1-E1-B8
attcccgggtcgaccccgactacacagtgccggcattcgcggccatgatgaggaagaaggtcacgatgcccgcccacttgatgtacgacgggcaggacgacaacctgtttgagcacttcagcgcggtggctcaacggctgggcgtctacaccgccatagactacgcggacatcctcgactttctggtgcagaggtggaacgtcgccaacctcactgggctgtctggggaagggaggcgggctcaggatttcctctgctcactgggaccaaggttcaggaagctggaggagcgagctcagggcagggcgaagcagttaccggttgttcctttcagctggatccatggtcggcaagtgcaactttgagtgacattgcaaaacaattataagacgatttgttcttcttattttcaaaatatgaagcaactgttgac

SEQ ID NO: 9705 - DNA, 359 bp, Triticum aestivum
  Clone ID: LIB31-004-Q1-E1-D7
ttcccgggtccaccctttcctcgaacgagttgaggaggttggcaggcaatcggcgggggaaggcgcctctgcccccgatccatctgctgctgtcacaacaaaaaccacaccgagagccagcgcaatgagcaagaagtcgagggctaggaaaaggacatgagctgtgcttcttgccagtgcatggatggaatacccagtactcccttggtctcggtgcataggacatgcgcgtagttctagggtgaatttgactaactaaaaatgtgatatatctcatcaaaagcagatcattggatacatatatgaatgtagtttctaaatattttttgttaaatataatacatattagctagttaaat

SEQ ID NO: 9706 - DNA, 385 bp, Triticum aestivum
  Clone ID: LIB31-004-Q1-E1-E8
ctggtaaattttacacccaatgtgaagcagaacgattccggaaaattacctactttcaggatcgcccggatgtgatggcaaaatatacttgccgtattgaaggtgataaaactctgtatccggtgttgttgtctaacggcaatcttatcgaacacggtgatcttgagggtggaaagcattacgcacgatgggaggatccattcaagaaatcatgctacctgtttgcgccagttgccggtcagttggactgccgggacgactcaattgttacatgttctggccgcaaagttacacttccaatttgggctcctgctcaagatttgccaaatacatcccatgctatgtagtctcttaaagaaccctacaaatgggatgaggaggtttt

SEQ ID NO: 9707 - DNA, 337 bp, Triticum aestivum
  Clone ID: LIB31-005-Q1-E1-A4
ccgggtcgacgcgtacgagtacaactcgtttacttgtcctccaaggactctcatgtattgcgctcttatataccccatgtagtcgcacctcagacggtctgtcgtctcgtgcttgtaatactcctcctcatagtgattgcgccttcatgcgtccgtggttttctcccgcaagggtttccacataaaaatctgtgtgcttccgtgtcacgtttatctcgttattctaagatgggccgtacaatattctgtcgtccatgtgggccgggtccttgtggtcaattcgtagccgatctggagacctcgtcgggcagcgcgagcgcctgggcgtaccgtaata

SEQ ID NO: 9708 - DNA, 427 bp, Triticum aestivum
  Clone ID: LIB31-005-Q1-E1-A6
taccgagtccagaattcccgggtcgacagacgacagaaaggaataggttatccggacttgccatgaaggatgtcgtgagtcttttgtggccgaaaaggcccgagccgaagagttattttggcttggtgaagcagttccgtggtgcggttccgcatatcaatgaaatgaggaggtcggcatgcatagagggtgcgcagatggctcttgcccgtgtcaagacatactgggcggagatgaaggccaccgatgttggatcccaagattcggacggaagccgagtacgtgtcgagcactattttcaggaagttctgcagggcgctcgtttaatagagacgcagtgctcgaaggatattatgttcgaataacatgtattattgtgaaacaatgtatcaatgggatataagagctttttatacttgtgcctctc

SEQ ID NO: 9709 - DNA, 433 bp, Triticum aestivum
  Clone ID: LIB31-005-Q1-E1-B8
gtaccggtccagaattcccgggtcgacataactaaaactccaggcggttaaaccaaaatcacatagaacaagggattacctcgctttgataccaattgaaagtatgttatatcgactagaggggggtgaataggcgatttttatgaaagtcttcaaaacatgggagttttgaagacaaacgatagaaatgaacctataaccatgcagcggaaggtagactaccctagacaagccatgatcaagtattcaatgaagtgaaagcacaaagactaacatcagctaggcagtacggatcaggatggaagataatatgaaaccaatctgaacaaacagtcacacagtgaagacaaatggacaatgcaaataggcaatgacttcacaaggaccaactgtaaataaagagatgggaaggatagaaccagtgaacttggtg

SEQ ID NO: 9710 - DNA, 421 bp, Triticum aestivum
  Clone ID: LIB31-005-Q1-E1-C1
gggtcgacaccgctaataacgtcaatgcacgcaaggataccttccgtgggcgtgtttgtgagtgccctattgtcaaaggtgtaaaattcgtgggggatggatataccaactgtgaagcttccggtgttggtaggtgtgagatcaacaatggaagatgctggaaagaaactaagaatgggaagacaatatctgcctgctcgcatgaagaatctgaaggttgcaaatgtccacaacgtttcaagggcgatggtgtaaaaagctgtgaagatattgatgaatgcaaagcgaaatctgcctgtcagtgcaatggctgcagttgtgagaatacatggggaagctatgaatgcagctgtggtggtaacaacatgttatacatgagacagcaagacacctgcatcagcaaacaagctgcctcctcagt

SEQ ID NO: 9711 - DNA, 439 bp, Triticum aestivum
  Clone ID: LIB31-005-Q1-E1-C4
cgggtcgactacagtctccaagggctcaacaatactatggaacttctcgacaaggtgaagccagcgcaggaaatcagggaatgcaatcatcctacagatccagttcgtttcctgcacctcagtatgcactgcagagggagaatgtatttcctgggagacctgatcagccagaatgcatatactacataaagactggagattgtaaatttggtgcagtttgcaaattccatcatccccgggtgcgctcacagcctcccccagactgtatcttgagcccaatgggtcttccattacgcccaggggaagagctctgcaagttctactctcgctatggcatctgcaagtttggcgtaaactgcaagttcgaccatccgatggcggctccgatgggggtgtacgcgtaccggtactctgcctccgcgtcgcccaatgctcccat

SEQ ID NO: 9712 - DNA, 443 bp, Triticum aestivum
  Clone ID: LIB31-005-Q1-E1-C7
taccggtcctagaattcccgggtcgacagacgacagaaaggatccttttgctgaggcaaatgctgaggatgctggtgcaggccccggcgcaaaagattatgtgcatgtgcgcatccagcagcgcaacggcaggaagagtctgaccactgtccagggcctgaagaaggagttcagctacaacaagatcctcaaggatctcaagaaggaattctgctgcaatggcacagtagtccaggatccggagctaggccaggtcattcagcttcagggtgatcagcgtaagaatgttgctactttcctagtccaggctgggattgcgaagaaggagctcatcaagatccacggcttctaagccgaagccgcctccgataaatgctcgaaccgccagccggctcttctctatattgaaggcataaggcatatatatattgccgcccgcttgt

SEQ ID NO: 9713 - DNA, 403 bp, Triticum aestivum
  Clone ID: LIB31-005-Q1-E1-D5
gtaccgagtctagaattcccgggtcgaccccttctacatgcgtgccaagatcttgggcagcgctggggaccggcaagtcgcgagttcttacctcgaaggcgtcattctggcaaaccaagatgggggtaactgtcctcgtgccttactttcccgagtaagtcctcccctcaaccggcccgtaacatatgaattcttacatttcgatcgtttttcttttaacattccgtgttttctgcagtgacacacgttgcacgctcatcctcctaagccccaaatattccatggccacgtatttcgacgcggaccgtcagtcgaacgtagactacacaaatgtcaagaaagttcttgatgatgttctccccggctacgccaaatctgggaggaccttcaccaggcctattcg

SEQ ID NO: 9714 - DNA, 449 bp, Triticum aestivum
  Clone ID: LIB31-005-Q1-E1-E8
gtaccgagtctagaattcccgggtcgacgaggtcatctaggctcctgcgagaagggtgacagggtcagcaagaacgcagatatcgccaagatggtcagaattggtgcggcttgatttggctcactacagcggctcctctcctctgtcgctcttgccggccaagccaagctggacatggatgtgtgggtgtgcatgctcactgtgaagtacgttctaggcgacctctttcagttcgatgtgtgtgctcactgtgtgggtcgccatctctctatcctgccaagctacaccagcacttgttgtttcctctccctgctgcaatcagtgttgtgagggacggacaagatggaggcatggagctggcgactggatatgggaagggagctgctactgcacttggtctgcttgacagctgccgttgtgcctgtacttggacggctgcagatagtgca

SEQ ID NO: 9715 - DNA, 456 bp, Triticum aestivum
  Clone ID: LIB31-005-Q1-E1-F6
caggtaccgagtctagaattcccgggtcgaccccctggccttgattcttttgccaatattttttatattttccaaaagttatctacgtggatttttaggtcattctgagaacttttattttctgcacaataaacaacaccatggcagttctgctgaaaacaacgtcagtccaggttagtttcattcaaatcatgcaagttagagtccaaaacaagggcaaaaagtgtttggaaaagtcgatacgttggagacgtatcaactcccccaagcttaaacctttgcttgtcctcaagcaattcagttgataaactgaaaatgataaagaaaaacttctacaaactctatttgctcttgttgttgtaaatatgtaaagccagcattcaagttttcagcaaagattatgaaactaaccacattcacagtaacacttaggtctcacatatcaatggcataatc

SEQ ID NO: 9716 - DNA, 439 bp, Triticum aestivum
  Clone ID: LIB31-005-Q1-E1-F7
attcccgggtcgacagacgacagaagggagggtttgagaactatgtagacatgaccgagacacgtctctggtcaataaccaatagcggaacctggatgctcatattggctcccacatattctacgaagatctttatcggtgaaaccgcataacaacatacgttgttccctttgtcatcggtatgttactttcccgggattcgatcgtcggtatctcaatacctagttcaatctcgttaccggcaagtctctttactcgttccataatacatcatcccgcaactaactcattagttgcaatgcttgcaaggcttatagtgatgtgcattactgagtgggcccagagatacctctccgacaatcggagtgacaaatcctaatctcgaaatgcgccaacccaacaagtacctttggagacacttgtagaacacctttataat

SEQ ID NO: 9717 - DNA, 449 bp, Triticum aestivum
  Clone ID: LIB31-005-Q1-E1-G5
taccgagtccagaattcccgggtcgaccgcctactgaaaggaagagtttcagcaacggtccttcccgtcggttatcactcggcggagcagataatgtgtctaaagtctcaccaaatggcttattaacaaggagatctccatctttccattcaagatcctctctttcttctagcagcagcttgatactaaaacacgctaaaggaacttcaaagtcatttgatggtggaactaggtcacaagacaggggaaaggtccatgggaatggatcacatttacttaacaaatctacagatgcagttaaagatcgtgaagcgaatgatggttggaaagggactgtggatgagggaactaatgaaagtccaaatagcaatgcagatcagagaagtaatgaaaccacaaatagcaactcaattgaaatggtctctggtttcctgtataatatgttgcag

SEQ ID NO: 9718 - DNA, 434 bp, Triticum aestivum
  Clone ID: LIB31-005-Q1-E1-G6
attcccgggtcgacgcagatttttatttctagctatttatcggtctgcatgtaactttcttacagatttagaaaaacactcagttaagtttagactgtccatgtcactcacaaaaaaattatactgtcgatgcatcttttgtggtctttcttgtagaaagcagcctatagatagaagacatccacgtgggtagtatttcagctctctcggcattatgaaatggtggtacaaatatagcatcaagttacacgacaaaaagttcccatcgatatctcataagagctttccaccaaaagaaagagaatctcgtatcaattagagattttccatatccgaggaaataaacatatagaggagagtgaccttttactatgaggaagcagacagcagtatgttcatgctattcggtactaacattaacggcgaggaattaa

SEQ ID NO: 9719 - DNA, 458 bp, Triticum aestivum
  Clone ID: LIB31-005-Q1-E1-G7
taccgagtcctagaattcccgggtcgacaacctctacatatcacacatccaggtgaaccaagcccaaaagcagaggcgccgtacataccgtgctcacggacgcatcaatccttacatgtccaacccctgccacattgagctgatcttgtcagagaaggaagagcctgtgaagaaggaggctgataacgtcgtcgcaccaaggaaagctatctaagctaccggaatggatgcattcgtccaacagtcttagttgtagttcttctcaagtacctttgttggcagtgtttgttgcctccttgatgtttttgttaccaacattgagtaaggatttgttaaggttgatgctatccttgtgattgcgagtggtctttatatgctaaaacagtttcagatatttgagcatcaaaaaaaaggagagggaggaagaaaaaaaagcggccgccctagaggatcaaagc

SEQ ID NO: 9720 - DNA, 388 bp, Triticum aestivum
  Clone ID: LIB31-005-Q1-E1-G8
attcccgggtcgactgatcgagctagctggcggcgaatcatgcacaagcggcggttggaaacaaccgaagtgtctgtctggggtttctggtgtgcggtcccacttccaggtagatgatgctgctgttgcaacgaacagcagcttcccaggtccaccgtgtgagagttagcaccagatggtccattgatttggtgtggctgagcagggttcctgggttgagtgagctgagtgaagcagtagaataaagtggtgaggatgtagtgtagtgtagccccggcctcacttgagttggtaggtaagtaaggtgtaccagcagcagcagcagcagcatctagtgcatgtagtagaaatgaaactgggtccccagctttgtagatagtcctggtga

SEQ ID NO: 9721 - DNA, 397 bp, Triticum aestivum
  unsure at all n locations
  Clone ID: LIB31-007-Q1-E1-A1
taccggtctagaattcncgggtcgacctcgttgagtacttcaacagccacccgaagctctgcaagtttgaggtccacggcgccatgtttgcgtcgctctgccaaaagaacagcctgaaaaatttggactcgaggttcctgatatcttcattggaggaggtcctaatcactgtgcgctcacccttgaatgctgagcagaagctgatcaccattgagtcccttgtcaggtatagtccaaggctgcggcggatggtccttaggatctcgcagatgaagaactgccacgaggctgcagatgaattctttgaagaggtttccaagtttgcgcatatgagtaatggcagagtgcggattgaataagaggggtgccgctgcatggctcagtgccttggctcttg

SEQ ID NO: 9722 - DNA, 443 bp, Triticum aestivum
  Clone ID: LIB31-007-Q1-E1-A11
ggtaccggtcaggaattcccgggctcgacaatgcttttgacgtggctcgtaagaacgttgaacttctttccacagtgctatcatcatctccatcttaagaggcgctagaggatgacttgactaacaacctggaccagcattgccaatattgtcattacacatgccagagaatcgtcgggactgcaggtgataacgaggctcatttctttgaggcactgagcatccattatgaactccaaagagttctgtccaagtacgaatacctcacagaatccatcgtctcatagcatgtgccatacccatcaatgattcgagtcacagtggatcttgacgaatcgccacgcgctgttggaatcgacacccccgtcaggaaatcatgtgggtccggtggccgctctatcggtcgggatgacttgcttcaggatatccactacatgactttc

SEQ ID NO: 9723 - DNA, 428 bp, Triticum aestivum
  Clone ID: LIB31-007-Q1-E1-A5
attcccgggccgacatccggtgaaaaaaggcggcttttaagcagaggatgtgggagtgttgggcacatttggttttcgacttgggtgtctaaatattctcaccatacttggctccctctcgggctttgcgtcattggcgcaacgagtcatctagttaacattcaatgaagaaaggtatgtgctactttgaaggtttatggtttatggttcatggcccagatccaacatgtgtagctttcgagagtgtgtactgaaaccaagtgtggtgttggtttctgtgaatagacatgacaagagaagatcgcttggagcagtctgcacgttgttgtctcattcacccatgtatgtatatacaacagttgttgctggatataattgtatctatagtcctcatactcgccggtgacgtcgaactcattcctggaact

SEQ ID NO: 9724 - DNA, 437 bp, Triticum aestivum
  Clone ID: LIB31-007-Q1-E1-A8
ggtaccggtcaggaattcccgggccgactattttttcacttcggccagcaggtgttcagtgccaacatctggctgctgtaaagagctaactgtgaagctaacttcattctttttttcttacccgtgctatgttacttgttctttctaacatcggtggccaagtacagccgtagctttaggagagtgcaaccaaggcacaaaggtgcgaattgtacaaataggagtagggaaagggtagaagcaaagaatatgttcctggcatggtagtaaatatgagatgtaaacgcactcgtagtgcagttaatcgtattttttgtagctagggtgtcatagttttgatgatcggttcggttgtatggctactcttatcagccacgctggaggtgctgccgtttttttgttccacgtgcatgataacaagatggaagacccttcgg

SEQ ID NO: 9725 - DNA, 439 bp, Triticum aestivum
  Clone ID: LIB31-007-Q1-E1-A9
ggtcaggaattcccgggtcgactgacggggaaggcatgaagaggggaacacgtgtaggggaaggtgcactaagggaagttgcggcttatattctcgaccatccagttggtgatcttgaatcgggccatggtgttgggttttctggtgtgcctcccacagcattagtccgaagcttacataggggaaagagcttcaagtttggatctctgcagatttttatggagaacgatggaagttgcgaggatatgggtccgcgtgcttttccagtgaaggaggtacacaaaatagcagtgttagatattaggttagcgaatgctgatcgtcatgcggggaacattctagtgtccaaggaagaaggtgccacctgcaagctgattccaattgatcatggttactgcctgccagagaagtttgaggattgtacctttgagtggcttta

SEQ ID NO: 9726 - DNA, 445 bp, Triticum aestivum
  unsure at all n locations
  Clone ID: LIB31-007-Q1-E1-B10
ggtaccggtcaggaattcccgggtcgaccaccggagcactgcagctcttcttctccaagtttggtgccaccagcccaccatgctctgttctccggtgaggcatctctacatcgtctgatctaacttaatcaaacaacccatatatgtttaaactcagaattagtatagttcaataaggcgacgccacgtggctctccaatagcagttgtggcaacaacatcagaaacactgccacgacagactttttggtcagatttcaattcaattttcattttgctataccttgagatccacacgttcaaatcaagtgatcctttttcctacatattcacaatgacctctaccgtgttgtaaatcaatatttcatttgtccanaccttttanatttgaccaactctaattcaaatttggatctccataagatcatatcctgcanaccgtatat

SEQ ID NO: 9727 - DNA, 442 bp, Triticum aestivum
  Clone ID: LIB31-007-Q1-E1-B2
tcccgggtcgactctggcaagtaaaccaccactggccatctgatctacaagcttggaggtatcgacaagcgtgtgatcgagaggttcgagaaggaagccgctgagatgaacaagaggtccttcaagtacgcctgggtgcttgacaagctgaaggccgagcgcgagaggggtatcaccattgatattgccctgtggaagtttgagaccaccaagtactactgcaccgtcattgatgcccctggtcaccgtgacttcatcaagaacatgatcaccggtacctcccaggctgactgtgctgtgctcatcatcgactccaccactggtggttttgaggctggtatctcgaaggacggccagacccgtgagcacgccctccttgctttcactcttggagtgaagcagatgatctgctgctgcaacaagatggatgccaccactccca

SEQ ID NO: 9728 - DNA, 437 bp, Triticum aestivum
  unsure at all n locations
  Clone ID: LIB31-007-Q1-E1-B4
gggtcgacgaggccttccacgctaagtatgatgtcaagctgaacaatgccattctcgccgaggacaagcacttgcccatgtatgatgagttgtccagcaagggcaatgttgaatatattactggaggagccacgcagaactctatcagggttgcccaatggatgcttcaaactcctggtgcaacaagttacatgggttgcattggaaaggacaagtatggtgaggagatgaagagtgccgctaaagctgcaggagtcactgctcactactatgaggatgaggctgctcctacaggcacatgtgctgtctgtgttgttggtggtgaaaggtcattgattgcaaacttatctgcagcgaactgctacaaatctgagcatctaaagaagccagagaactgggcactagttgagaaagcanaatacatctacattgctggc

SEQ ID NO: 9729 - DNA, 444 bp, Triticum aestivum
  Clone ID: LIB31-007-Q1-E1-B6
ggtaccggctcaggaattcccgggccgacctcccaggcaagaaaccaaactggtttttggtcacgcttgtcattcttcttaagcggtgctcaatgactctctcccatagcttcattgtatggctcatcagcttaattccacggtaattagtacaactctgaacatcccccttgttcttgaagattggtactaatatactccgtctccattcttctggcatcttgtttgcccgaaaaatgagattgacaagcctggttagccatactatcgctatgtccccgagacctttccacacctcaatggggatacaatccgggcccatcgccttgcctcccttcatcctttttaaagcctccttgacctcagactcctggattcgacgcacaaaacgcatgctggtctcatcaaaagagtcgtccagttcaatggtagagctttcattct

SEQ ID NO: 9730 - DNA, 445 bp, Triticum aestivum
  Clone ID: LIB31-007-Q1-E1-B7
ggtaccggtcaggaattcccgggccgactgtctatgcaacctctggataatgtgttcccctgtcttgttttatttgtttgagcatcctcaacgatatacttgggtggtattgcaatcttctataactttccacctgtaatcatatgtattatgtattgcggatggaccagctgattcaatggttgacagaaaggactcaacctgcaaacaagaccattgttcccaaggtggtgaaatacaataccctgggccacatcttccagaggatatttggtgtcatatatattccctactgccaatgcgagattgttttccgttactacaatgccaaagtctgtaacattgatagctggtttcaggctgctgttacaccggggattgaagaactcactatagaactatcttcaaagtcaggaagatattacaactttccgtggtcactttt

SEQ ID NO: 9731 - DNA, 429 bp, Triticum aestivum
  unsure at all n locations
  Clone ID: LIB31-007-Q1-E1-B8
attcccgggccgacgccggcatgaaggagctttgggccaccggctggctgcatgaccgcatacgtgtcgtcgtctcaagcttcttcgtcaaggttctccagctgccatggcgctgggggatgaagtacttctgggacaccttgctggacgccgaccttgagagcgacgcgttgggctggcagtacatctccgggtctctgcctgatggccgtgagctcgaccgcattgacaacccgcagtttgaaggctacaagttcgacccatacggggagtacgtccggcgatggctgccggagctggcgaggctaccaacggaatggatacaccacccctgggatgcacccgagtctgtgctgcaggctgcaggaattgagctaggttccaattaccctctcnccattgttgagctagatgaagccaaatccagat

SEQ ID NO: 9732 - DNA, 447 bp, Triticum aestivum
  Clone ID: LIB31-007-Q1-E1-B9
taccggtcaggaattcccgggtcgaccaataagttaccaataagatatccccaacattggttgtatgaatgatacacttggtgctttgattgtattcttttgtgaaagattcagatttattataaaagtttattaaaagtacaaagcacctcaaacacaattaaaaatatgtcgaggtctctaaacaaccaaacgaccattaccgccgccggaatggtctgccgacgcgtctgtgtcgccactcgtctaccgaagccggcttgaccttgtcgatgacagccggaaagtcttcgtgcacgtgttcgtaaggacctgcgccctggagccgcaggcattgccgttgaacccacaaatagatttgaatcagctgacaccaaatatcaccgttgtgcaagcacaatgagaaatcctaacctcaccattccaagaagacaacatgaatccaca

SEQ ID NO: 9733 - DNA, 454 bp, Triticum aestivum
  Clone ID: LIB31-007-Q1-E1-C1
cgccgccaggtactggtctagccttcccgggtcgacatcggcgtgcaaatcaccaacttcaacgactcactagacagtggtagcaaagtcatatcgctcaggctcccacgagcaatgtctgcatagggcagttaacaggacacctgggtcgaagacggcctggatgcgcctccagttggttcgccgtaagggccagtactcatcgaggaggcgacccttggcatgcatacaattgtgcttcttgccgctcgacattctggcattgatgctcactgtgcttgtgcacttggccttaaacacacttgctccatgtgtcactccagacatgacagttagcattatcttgcatgctgacctcaaagtacttgtaggtagagtcctcattcacccactaggagttgcgcacataaataccactcaacctgagctcagctctctcctcaacagtaaacct

SEQ ID NO: 9734 - DNA, 422 bp, Triticum aestivum
  Clone ID: LIB31-007-Q1-E1-C10
ggtaccggtcaggaattcccgggtcgacggtaatgtgacagttgaaggcgtgcctcgcggggacgacatgtcgataccgtgtcatgcgggagaatgctatgaagagtgcatctcattctacaccggcctggtgtgtggaaagtgcatgttgaagccgcttctcgtagctgtgctcgatgaagtatgttggtcggcagtctagctaatcgtacagggcgatgacatggtgtgcatgtagtcaaatggtggtgtagatgcagatgcagttgcagatcggtctgtgaggtcgttcatcttgatgtatatggcagttggctatcgtagcccatctggtcgtgcgtaccggtcgtgtagtcatcgtcgatgcacagagtccaagtcatgttgcatgtatcacctcgtaggagattgattcatgtgga

SEQ ID NO: 9735 - DNA, 410 bp, Triticum aestivum
  Clone ID: LIB31-007-Q1-E1-C5
gtaccggtctagaattcccgggccgactggattcacaacacaggagtgacacatgccgtccacgcgcgcagttggcaccaacggatctctgcatcgcctgggtccactgtccggttccatgtcgcgcactcgctcgggattggataggacctatcattgcgctccggcgtatttacatagcaacatcgctcatgtatcacctgtcttgcaatatgcacgcacatcgctcggtcactgatcacgcaccgcttccttgcctgtcccctaatactttgtactcactcgcttctgattccatgtcatccgtcgtgtactgaccacggattcacgtctaactgcgtctccggaccgcccaggatgaaaatcccagtttccgtcatgattcattgtcacataagtttgcacgcacc

SEQ ID NO: 9736 - DNA, 446 bp, Triticum aestivum
  Clone ID: LIB31-007-Q1-E1-C6
aggtaccggccaggaattcccgggccgacccatttgattaacccccacattatactttcttccccatcttgctcgttctccattggatagaacacatcgttgaccctcccgctgttgcgccgtcgcgcacaaccgtagcctcaacattggaatcaccccaacgtgctctagttgtagccttcgccagttctagcaccttcccgaggctgcttaccgccggggatgaagcatcctcaatcaacagttctagaaacccatcttaccggttccaacaaattactttaccacctctagcacctccatcgcaaattggtcactaccaaggatgtagcatgccaaattcattttctatttttcaagtgcccaaaatgagtttttgtgaataacctagcaaataattgtcacaaaattggaccacgtcaattttataaaatactacgccatat

SEQ ID NO: 9737 - DNA, 441 bp, Triticum aestivum
  Clone ID: LIB31-007-Q1-E1-C8
gtaccggccaggaattcccgggccgaccatgagggccacaccctcctctacaacggcacggttggcgccctctgcgccatgaacaggatggtagacccctgtcacagctcaatctccgtcgttgttggggacgagctgtatgccatggccatcaaccgtggcctgctgcccaaggtggactattttaaggctcttacctatggccgctcgttcggccactgccagccagaggactggcactggcgccctctccagccgcctccccttgaatacgaccacgagaaggatcaacgctacaaccccactgcggcgcctgtgacacacccctgtgctattggcgcatacacggttgttcgtgattcacagatctggatatctacaacgggcgctggcacgtactcctttgacacaactagcagcgtgtggagaaagattggcgag

SEQ ID NO: 9738 - DNA, 435 bp, Triticum aestivum
  Clone ID: LIB31-007-Q1-E1-C9
cgcggcgaggtaccggtcaggaattcccgggtcgacgcatcgcggagtcgtggctggtgtggcaaccgacgaggttgctcaagcaaggcggtagccctttgtgccgttgttgaggtagccgagagcgtgggtggaggagccgtggtcgaggtatccatgcgaagaatgtcatggtcgatgtcgagttggggtagccggtgtcgaggaagtcgccgtggagccgcgggcgcaaagaggcgccgagttagtcatgggcgcagtagtggtgcaccggggagaagacgttgttgacgacgcgttgcgccggggttgccaagagcggggacatatcgtagacgaaggcatgcaccagtggtgccagcaccgggcatgcgtagatggacgaagacgaagttgacgaagcgccgcaccagacttgccaggcccggggacacg

SEQ ID NO: 9739 - DNA, 455 bp, Triticum aestivum
  Clone ID: LIB31-007-Q1-E1-D10
tacgcgtcgaggtaccggtcaggaattcccgggtcgactatgatagttgcaattgcaagcatttatttggtccagagaaaacaacatggtcagtatcttcgaaagccacaaagcagttggctatcactcgttgtccgaagatcttgtgcattcatttgttacgtgcttctattagttttgatggtgaactcgtaaagcgtcagggacacgtttcttttcctttacttctcaatttatccccatttgcaggaggcacattcaccactggacagggacctggaccttcagctatgaacgtgcaaaaatatgacacgccgtctctcaaattctataggcaactaaatgcacacatgcccattaatatgtttcctactggtgggaactcatcaagtcaggcacctaaggatcaagtaacaaatggtggtgtccactcacttaatgagggaaatgctgat

SEQ ID NO: 9740 - DNA, 428 bp, Triticum aestivum
  Clone ID: LIB31-007-Q1-E1-D5
gtaccggtccagaattcccgggtcgaccgatcttcccacaacgtttgcctccgccgccgcgctccggccgtcatccaccactagcttttgtccacaccgccgcggcggccaccaacgaccactttggcctaatcatggtccgcctgcgcttcatgtccgatcaagcttttccaataatgttcggcaccgcgacaaccaccatgaccaggtttggcctgatccttgtcggcgtacacctcttatctttgagagggcccaacagggcgttttaattcgttctacaactcacttctgttagttggctctcaagatgcttattgattttcgtagcctaggggtgtataaattggtcaaactgtgtttaaagaggcgaggttttactatttaattttctaacgatcctatactataacagaagtggatggtag

SEQ ID NO: 9741 - DNA, 429 bp, Triticum aestivum
  Clone ID: LIB31-007-Q1-E1-D7
gtaccggtctagaattcccgggccgacacgacagaagggtcagcatgtgctctcttctcaaaaacatggattgaagtctctggttcatcagccaaggatgttgcgaagcagctgaaggaacaacaaatggtgatgccaggccatcgtgagtcaaacctgcagaaggaactgaacagatacatccctactgccgctgcatttggtggagtgtgcatcggcgcattgactgttctcgctgatttcatgggcgcaattggttcaggaaccggtattctgttggctgttaccatcatataccagtactttgagaccttcgagaaggagagggcgacagagcttggtttcttcgggttttgattgatacatgatagctttgggagcatgttatggctacagcacagcttgagtctttctagacagtcgcagcac

SEQ ID NO: 9742 - DNA, 441 bp, Triticum aestivum
  Clone ID: LIB31-007-Q1-E1-E11
aggtaccggtcaggaattcccgggtcgacaagtaggcctcaacctgctgctcacttcatgggcatgcatcaaagcctcggtattcagctcgcacagcttgggaaggatgcttctgcagcaggagctgcacgcagaggtaatactcagcggaagacagttgaggtcgagtctgttgcagctgcagggaagcaacaagctagagaagtagtgaagaaatctttccgtgccgagttcctcgagaagctgcacaaagatttggatgacgatatcgatgtgagagccttggaaaatggatttatatctgtcactcctctgaatgtgcacggccgtgtcgagtctgaactcgaagctccagcgtcagactggctgtcagcagctgtgtctgtatccgaagaaaaggaagctccagcgacctaacaaacacgcagaaatgtacactgt

SEQ ID NO: 9743 - DNA, 378 bp, Triticum aestivum
  Clone ID: LIB31-007-Q1-E1-E2
gggtcgactgccaccagaacgatatccatcatctcatcgaaagacgggacacctttgcctctatcaagtggtatcagatttccaggttgctcggtgagattttacagtttttcatagtttagatcgagtctgttcttcatacctatagtccacgaaaaagccactagtcctagtccgagtccagtaattgttgcattgttctcgatttccagatcacgcgatactccgagtcgtgacagagaaggactccccaacttccgagccatccgcagaagaaaaatagttccaatttcaaaaaaaaaactaagtctggaaaattctggctaggcagtttttagaccatttgtagactttttcgaaaaaaaattgttgcggagc

SEQ ID NO: 9744 - DNA, 443 bp, Triticum aestivum
  Clone ID: LIB31-007-Q1-E1-E5
gtaccggtctagaattcccgggccgactcccctacggattctggaatattggggtatttatagaagaaagagatggtcccggggggcacccgaggtggccacaaaccaccagggtgcgcctgggcctcctagcgcgctctggtgggttgtgctcccctcggggaaccccccaagcgcagccagggcccgtcgtgttccttctggaacataaaaattctccgtaaagtttcatggcatttggactccgtttgatattgattttctgcgatgtaaaaaacatggaaaaacaaaaactggcacttggcactatgtcaataggttagtaccaaaaatggtataaaatgattataaaacatccaagattgataatataacagcatggaacaataaaaaattgtagatacgttggagacgtaccaacatccccaagcttaattcctact

SEQ ID NO: 9745 - DNA, 442 bp, Triticum aestivum
  Clone ID: LIB31-007-Q1-E1-E7
gtaccggtcaggaattcccgggccgacagcaacgacaaagaccgtattgctgaggcaagagatgagctccacaggatgctgaatgaggatgagttgcgcaatgctgtattgcttgtttttgctaacaagcaagatcttcccaatgccatgaatgctgctgaaataacagataagcttggtctacactctctgcgtcagcgacactggtatattcatagtgcttgcgccacaagtggggagggtctgtatgaagggttggactggctctccaacaatatagccagcaagtcctgatagcttccaatggattggcagagccgcagaagcgactggcggctggacaaatgactggaatatgtaggcatgttaaagtgctgccagagtgttgacatgtctttgtaagctctatctttgagcagttatcacactgttactatgttgt

SEQ ID NO: 9746 - DNA, 438 bp, Triticum aestivum
  Clone ID: LIB31-007-Q1-E1-E9
ggtaccggtcaggaattcccgggtcgacgtgattctcaagtgcacgctgaccaaccctattctgcggcccaagatgtcagaagttctccaggcccttgaatctaatgtgacgctggcggagaatggtgtggacttgaatagagaagcgctgctgccttatggaggctcttgcagtttctctgtgagacatggggatcctcacgactcatcgtccttcataatagagccaattgagctatccggtcctagatgatggcaagtgctggtttcacgagagaaaacagaggaaagcgatgatagttgtacaaaacatgtatagactggatgtagtccaacttgggaggagcttcctcaggttgcgtctcacaaaccattttcggctagaaactaggaagatcatatgtttccactgcaaatctgtatgccaccacaaactgc

SEQ ID NO: 9747 - DNA, 87 bp, Triticum aestivum
  Clone ID: LIB31-007-Q1-E1-F11
caacacccagtagtgagtcgtattaaacaagtcagccctggccatgtgacacacgtatgccataatggaagcctcctcgcacccact

SEQ ID NO: 9748 - DNA, 436 bp, Triticum aestivum
  Clone ID: LIB31-007-Q1-E1-F2
cgcctgccagtactggtcaaccattcccgggtcgacacgttgtaccacgcagctgcaggtaatcacaggggcatataatttgtcaatccgcgccgtgggcaagatctgcgtcctccatcattgccattcatggacttgggacagagcttgccaaatggtcaccaacggcaatcgtgaccttcaggtatgagcctgacatacgtatcaaccaagagttcatggttacatatacacatctagctaactaccaccgcgtggagaccagccctactaccatatttgacattgctcgcgtcactcaacatgtagcgattgtggtcccatctgcatacacgtactgacgataagcgtgctcagacatgacatatgtcaaggctgaagtcagcaatggcatacatctatgccaatgaggacagctttgatttcactgtcaaga

SEQ ID NO: 9749 - DNA, 442 bp, Triticum aestivum
  Clone ID: LIB31-007-Q1-E1-F5
gtaccggtcaggaattcccgggccgactataataaaaatgaaagaatggatggatcatgaatggatatcaatatagtgataccataatacgtgtctgcaacttcactggagagtgtcgtgtggcacgacaacataaattcatgctaaaccatctcttttcggattgttggttgtttcattgttattccctacggtgtagttgttcgcctgatgtatcagttcaagatgtttatgtgttctcttaaattgaataaagtgttgtctcaattgtgtattatatgtcatactttatttattttgtaccatcatcgtgtgacgcctacacctggtaaaggaaaagaaaatcgtgtggcaccaaattaaattcaggaaaaatactcacgcgtagacatgaaaaatatacgcatgcttgtagaattatacggtagaatgaaatgtacat

SEQ ID NO: 9750 - DNA, 307 bp, Triticum aestivum
  Clone ID: LIB31-007-Q1-E1-F7
gtaccggtcacgaattcccgggctgacactgttcgtaaagagaggacgattcctgagggacagactggtggttttgatcagtcggaagagcactttcccgagatcatgcaacgtgtctctatcttgcgtggcagcgtcttattatggtgcaatgctgggatcactgcgatcttcatattgtggttgctcatagctattttcgagagttgagtctgtcgtacaatagatatctccagacatgcttgatgatgtgatttgatgaacctgcattgccaagagagcacagctgtataacctgaaggaaagt

SEQ ID NO: 9751 - DNA, 379 bp, Triticum aestivum
  Clone ID: LIB31-007-Q1-E1-F8
gtaccggccaggaattcccgggccgacgacgacagaaaggatggctggtggaggctctatggttaaaatgtttttgcgcaaagccaatttttccctactgcaaaggaatatattttatttaactatcatggtggctggtaaacattgagaatggttgacaacattctcaatcccaattaagcatcatctttaaaacccaacaaaattaattaaagtaacatgatgagattcacatgaaaatccaagtactagatactcaaaacgtccataactggggacacggctaatcatgattagtttatacactctgcagaggtttgtgcacttttccccacaagactcgatctcctccgttggttttctcgtactacatggtgtt

SEQ ID NO: 9752 - DNA, 439 bp, Triticum aestivum
  Clone ID: LIB31-007-Q1-E1-G3
tcccgggtcgacggtgtggcaaacgccactttgacggtcgagtcggcgcgggataacctcgagcgtctcatcggcaaggagaagaatcaggacgacgagaaggtcttcatccagtcattcctcgcgttttgctttggtaagacccacattcttaacaaagtactaaactttttttctttctttttagttgttggatctgcttccacttttgaatgttgtgtttagatctcattgtttgccaccctagttcaatagaaccatagatttttggctagcgatggctctgtcatacgttattccttttaagtagtttttttataaggcataatttttcaatatagtggcatatagttgggtacatatggcttcacaatacgtctttctcataagaaaattttatcataggctaacatagtgcaatagaacagtttgctatttt

SEQ ID NO: 9753 - DNA, 424 bp, Triticum aestivum
  Clone ID: LIB31-007-Q1-E1-G4
cgggtcgaccgtaatccggatctggcacatgtcctgaatgatccaagaattctccgccaaactgttgaagcagctaggaatcctgaacttatgagagagatgatgcggaacacagatagagccatgagcaacattgaatcttctccagaagggtttaatatgctgcgccgcatgtatgaaactgttcaagagccatttatgaatgcaaccacaatggctggggagggcgacacaaatgcaaacccatttgcagctcttctaggaaaccaggggtctaaccaagccagagatccaactggagatgcaccaactactgctcctgctccaaatactaatccactcccaaatccctggagtgcaaatgctggggctgcacaaggagcagcaaggccttctgctgctgcaaggagtgccacaagcggtg

SEQ ID NO: 9754 - DNA, 445 bp, Triticum aestivum
  Clone ID: LIB31-007-Q1-E1-G5
ggtaccggtcaggaattcccgggtcgacacgacagaaggggagattgagagaggaggagagggtttttggagaggagactcttgccattcctcgccggccgcatctttgctcacctcgccggccgcttcaatcaatcagtgttgattaatcggcgtcggatccgtcgatctaagagatccatgccatcaagagatggggtctcgtatggagtgcagttcagacgagtcgtcagagctaggtgacactgatatcgatgactatgctgagaaggcgtacacagacctcaagtctggcaagcttgtggcgaggttcggcgccgacaggtttagatgcccgttctgccccgggaagaagaagcaggactaccgctacaatgagctgcttcagcacgcaattggtgtgggcgcatccaaccgtgctgccaaagtgaaggcaaaccatcag

SEQ ID NO: 9755 - DNA, 448 bp, Triticum aestivum
  Clone ID: LIB31-007-Q1-E1-G6
ggtaccggtcaggaattcccgggtcgaccaggctgagaaaatgggacttgactacatggatgttgaaagtctcaagaagatgaacaagaacaagaagcttgttaagaagctagccaagaagtaccatgctttcttggcatcagaggccataatcaagcagatccctcgtctccttggccctggtcttaacaaggcaggcaagtttcccactctggttagtcaccaggaatctcttgaagccaaggtcaacgagacaaaagctacagtcaagttccagctaaagaaggttctttgcatgggtgttgctgtaggcaacttgtcgatggacgagaagcagatccaacaaaacatccaaatgagcgtcaacttccttgtgtccctcctgaagaagaattggcagaatgtgaggtgcctgtacgtgaagagcaccatggggaagcgtgtacgt

SEQ ID NO: 9756 - DNA, 446 bp, Triticum aestivum
  Clone ID: LIB31-007-Q1-E1-G7
ggtaccggtcaggaattcccgggccgacgagatgtttgcgcgatgatggcctcgggagggccatgacacggtgcaggcagggagcatatcaggatactgctgctcgcgtgctccagcgcaggcggagctagcagcgaggaggagaagggagttggggcgctccggaggagaacgaagggaggcggcgcacgataggaacgagagggagatcgagagaaggaggagggttcgagcgcacgggatgggatcgggctcctccctgacggcgctagcagtgaacgggagatgaagaggggatcgggatacggcggctagagttgagaaggcgggggtcggctgcgcctaaagtaacaaatgggccagaagaagaggttgggaggcccaggtggccagaggcctggttgggctctctctccgttattccttttagaaaaaaaattgtttat

SEQ ID NO: 9757 - DNA, 448 bp, Triticum aestivum
  unsure at all n locations
  Clone ID: LIB31-007-Q1-E1-G8
ggtaccggtcaggaattcccgggtcgactataactcctccatcctttctgtttttccagctgaagcatgcgaagtaatcagtggatacgcttgttctgctgatatttaccctgaagtcaagctcgatacaaatcccgtctcacgtcccgtggcttcagagcccgttgacagagaatacgaagagtataacagccccaaaacggttttccgtgaagaggcctgcgatgatcttggaggagaattctgtgaacctgactttcaaaaagatgccaactagaagaaacaagattttatgtcatgtgaatatgtgtttgtatttctacaagtctttgtaaccactccttaatttatgatatctagcttcactacttaatcaagattgatgttataaaaaanaaananaaanaaaaaaaaaaaaaagcggccgctctagaggatccaagcttac

SEQ ID NO: 9758 - DNA, 440 bp, Triticum aestivum
  Clone ID: LIB31-007-Q1-E1-H3
tcccgggtcgactgacaaccatagataagagcaaaaatactgaagacagcatagattttagcatacagtgcgattagcacttgacctctttcagcccatgtgcaaagtacaggaaagttggatcagcagctccctccttgtagtaggcgaacaccacgccgccatcatcatgcatgctctcgccaacaaagaactgaaggtccttgagcttgctaagaagatactttgtggcggactcaacattcttcttgaaagcatctaggtcatccccttcaagcttggcagagaggttcttgatgtagcgcttcatgtgagagataaactgcttcttgtcaaaagcaggttgctcctgaagacggaaggtgtcaacaatgtcaaccaccttcacggcctggtcatcaacaccctcatcatcaccaccaccctcaagcagaggattg

SEQ ID NO: 9759 - DNA, 445 bp, Triticum aestivum
  Clone ID: LIB31-007-Q1-E1-H6
ggtaccggtcaggaattcccgggtcgacgtatcacaggcgccttctgtcgaatgagtggatgacatctgtcccaacggggagccgacacgtgtttcctccagccaatgatgattttacacgtgggaaatccccattggccggggctgttaacgggttatcggatgcataacccgacccgatagcttaacggtgttccgttacggtggatgccacgtgtcggtcacccttgacgaaagcagttctgtggcacacgatttatcgtcatggaagtgtacacatccgtgatgataattttggtaatgtcatcgaacacttctacgacagcacaggtatgactatcttgattctgtcataaatttgtcatggatgtacatgcatgacaagaaatgcgacctactgtgacaaacacgtatcatcacggaagtgtatattttttgtagtgag

SEQ ID NO: 9760 - DNA, 242 bp, Triticum aestivum
  Clone ID: LIB31-008-Q1-E1-A12
taccggtcaggaattcccgggtagacccacgcgtccggctgtctcgtgtacggacctggtggtacttccatcagcacacgaacaatcccagtcagtgagacggcactcatgggaaggatacccatgcagagactgagctggactgatgttgttactgactgcctgttcgccagttgacgccagatccgtgcccacattggccgatcagattcaagtgcaggacaagttcgatctgtctacga

SEQ ID NO: 9761 - DNA, 445 bp, Triticum aestivum
  Clone ID: LIB31-008-Q1-E1-A6
ccctgcatataccggtccgaacttcccgggtcgacggagatctccgttgaattggccaattggccatgatgtgctcctcgactagtcatgcgtgccttgttgctgcaaaacggcatgcaaagcacatgttcctctattgtggataatgtatccggtgctctcagttttaggatgctatccatgttcccaacctaaaaatcatcataacttttgtaaagtagatcagcctaaatcatcataacttgcctcaagatcccagatgcatgctctgtcttcagcaaccagaaacagcaactcacctctgcaaagactgtcccttcacggtcgcggtttggaaccaggtgaactcttggactaacgaaggcgttccaatctcgggcttcctcccggagccaggaaatgtgtctgactggtgggacaagactctgaattcccagtccaagca

SEQ ID NO: 9762 - DNA, 470 bp, Triticum aestivum
  unsure at all n locations
  Clone ID: LIB31-008-Q1-E1-A7
acgcctgcatagtacggtccgaacttnccgggtcgacaaagctaataacgtcactgcatgcaaggataccttccgtgggcgtgtttgtgagtgccctattgtcaaaggtgtaaaattcgtgggggatggatataccaactgtgaagcttccggtgttggtaggtgtgagatcaacaatggaggatgctggaaagaaactaagaatgggaagacaatatctgcctgctcgcatgaagaatctgaaggttgcaaatgtccacaaggtttcaagggcgatggtgtaaaaagctgtgaagatattgatgaatgcaaagcgaaatctgcctgtcagtgcaatggctgcagttgcgagaatacatggggaagctatgaatgcagctgtggtggtaacaacatgttatacatgagagagcaagacacgtgcatcagcaaacaagctgcctcctcagtcggctggagcttcatgtggg

SEQ ID NO: 9763 - DNA, 448 bp, Triticum aestivum
  Clone ID: LIB31-008-Q1-E1-B2
tggtacgcctgccggtaccggtccgagattcccgggtccactacctgatccgcacaaagtgggtgccctgcctcgagttcagcaaggttggcttcgtcttccgtgagcacaacagctcccccgggtactacgacggccgatactggacaatgtggaagctgcctatgttcgggtgcactgacgccacacaggtgctgaacgaggtggaggaggtcaagaaggagtaccctgacgcctatgtccgtgtcatcggcttcgacaacctgcgccaggtgcagtgcgtcagcttcatcgcctttaggccaccgggttgcgaggagtccggcaaggcctaaactacgagttgaaacaatggcctatctcgtatgaaggtcttttgtgaacttcacttttgtccaaaactctgctgtacgactctgctttctgaccggagcataccttttgttct

SEQ ID NO: 9764 - DNA, 462 bp, Triticum aestivum
  Clone ID: LIB31-008-Q1-E1-B5
cggtccgaaattcccgggtcgacaaaccaggacgcggacctcagacaagaattctttcgcatccagtcggagtttgcggacatcatccatcaagatgtccttcataccttggggcagttctacctcagatatcaaccgtccaacaatgagatagatggaacgctacaaatgcagggtgacaacgactgtgatttcatgaccatcacgacagacggcggcttcatccacgctcctgtccgatgagtcgagtcgaaagtagtgatgtgtagttctgaaacattgattggctcatgttgtaattaaagtttaatgaattcgtatgtctctttggtttggacagtcattcaacttagatgtaattgatgctatttattagtaggagcatgaatcgtgctattaatgtctttcttttctcttctgatccttttgttgcatacttacatattccttatgtaatttctg

SEQ ID NO: 9765 - DNA, 444 bp, Triticum aestivum
  Clone ID: LIB31-008-Q1-E1-B7
ggtccgacacttcccgggtcgacccaaccaacagagccatgctcccctccgatggtgatccccttgttgcgagaatggaactcaaaatcccggcggcgaatcaaggcgcatcagcttggtgctccatgtctttgtcttggagctgtacaggtggagatgaaagtgcccgtcggtgtactcccgctcaacgaaggccctgcggagcacggcgatgaagaacatgtcctagtcgcggcggcgcagcaacgcgacctcgtggccgaagaaggtgaagtcggggggcgagtggacgagcttgaccgacggcggagtgttcttggtgccggcctggtagacgaagtagcggatgttcttggcgtacatgtactggcgctcggggcagatggtgatgcagagcaaggcgaggccgtcctccgtgtagcagaccttggggatgctgccgta

SEQ ID NO: 9766 - DNA, 464 bp, Triticum aestivum
  Clone ID: LIB31-008-Q1-E1-B8
cgcctgcatagtacggtccgaacttcccgggtcgactcacacagaaaacgattgctatctcatcgaaacatcgggacacctttgcccctatcaagtgatatcagatttccaggttgctcagtgagattttacagtttttcgtagtttagatcgagtttgttcttcatacctatagtccacgaaaaaggcaaaaaaaattagggttagttcatcttatccgaaccaatctgagcctttgcataatctttttggcctttgctttgttgaatttgccagtgcatcatcgtgtcaagttgctggtcctagagtctagccctttagagttttgagttctgctcacaagttgtcacgtcgccgccgcaccatcgtcatcacagctgccatataccaccatcgtcatcgccgctcccatataccacatatccaccgcttatccgccaccgcttcgaatccgtatccatata

SEQ ID NO: 9767 - DNA, 332 bp, Triticum aestivum
  Clone ID: LIB31-008-Q1-E1-B9
attcccgggccgacccacgcgtcaggtggcatccgttcacagcccattccccagctcgaaaaggtttctcagtgtccgtatagttgcgctggtttcaggctcctattactagctggtaaggcagtcttctcccgtgaacctcgattggattttcacgttatgatcttgcacagtattgcagataatatgtagtctatccaaacaatgctgagatgatctacgggattaactcataagacatgtgtgggatatagtattgtcgtcatataggatttggacacacatatgatacgatattacaacttagtacgtccattgacacaccttagtcc

SEQ ID NO: 9768 - DNA, 300 bp, Triticum aestivum
  Clone ID: LIB31-008-Q1-E1-C2
gcgttgtatctcgctactccctatagtgagtcgtattaaggcatggacgacggggatgtcgagattccctccgcttaaagacctgatgtcgaggtgatgatcatctctgatgtgatggaagtcatagcatgttgggtatgtagggtccaggcgatgtgatccctcggcgttttgggaggttttagcgttgtgcatgtgagacgtcattggtactagtgcataggtggtctttgcaatgtagacggtgcacttgggtatagttaatccaaaccagtcagtggtttgaatatcgtctgtgat

SEQ ID NO: 9769 - DNA, 89 bp, Triticum aestivum
  Clone ID: LIB31-008-Q1-E1-C8
gttgtgtctcacaattccctatattgagtcgtattacgcttatttcgatcgaatccttccctgatctgcaggatttcattctccttgtt

SEQ ID NO: 9770 - DNA, 440 bp, Triticum aestivum
  Clone ID: LIB31-008-Q1-E1-D10
gggtcaacctcatgtgtcaggatatctagtggacgtgtaatttggactttcgtctgagtgttccttgttgtgatttgcgtgttcctcttgatttcccctccaagttgtgaaagaccaggccacctagggttcctaccctacatcactgcttgcataccatcattccaaataagcacaggggtatttctgtctttgatgaaatacaactaaccatacaggaactttttactgaaattgatatggacatcatcataatgggaggttggagtacacagacacaaaggattgatatatcttcagaaatgcaactcacaatatcagtagttgcatgtattgcctcaaagaaggtctgaacttatcttgtcttagaatgaaacaacccgaggcaaccatattcacacttggagtactaacagcttcaattagccttgattatatac

SEQ ID NO: 9771 - DNA, 468 bp, Triticum aestivum
  Clone ID: LIB31-008-Q1-E1-D5
cgcctggctagtacggtccgaacttcccgggtccaccacttctacatgcgtgccaagatcttgggcagcgctggggaccggcaagtcgcgagttcttacctcgaaggcgtcattctggcaaaccaagataaggataacttcctcgtgccttactttcccgagtaagtcatcccctcaaccgccccgtaacatatgaattcttagatttcgatcgtttttcttttaacattccgtgttttctgcagtgacacacattgcacgctcatcctcctaagccccaaatattccatggccacgtatttcgacccggaccgtcagtcgaacgtagactacacaaatgtcaagaaggttcttgatgatgttctccccggctacgtcaaatctggaggcaccttcaccaggcctattcgtaagtacggcaagcacgtgttctcccacaatacgacattctactgcgtcaagcagccg

SEQ ID NO: 9772 - DNA, 391 bp, Triticum aestivum
  Clone ID: LIB31-008-Q1-E1-E12
attcatcgtccacatgtggcatcagagtggatatccccgagttccttcggtggataggaccttctcgcttctcgggaatttgactcttctccaaaggtccctttcttacataatgcctgttgagactcgccccgcgtacattatatgccctcttgtaagatatcagaattgttcagtctagctgttttccgatgaggttttacttttttgtactttgttagatctatctgtgctttatcctggaatgctactggcaataatgtgtagctgtgaacatatcaatgttgtataaaatgttctgccttgagaaaaccttgcagcagggatttttgaagcggccgctctagtggatataaacttatctacgcgtccatgcgacgtcaagcttctt

SEQ ID NO: 9773 - DNA, 110 bp, Triticum aestivum
  Clone ID: LIB31-008-Q1-E1-E5
caaaattccctataatgagtcgtattagcatttaatgcatatcctcactcatctttgttcggaacttggtaccaatccagttattatcatgatctaaatcttttgatacg

SEQ ID NO: 9774 - DNA, 455 bp, Triticum aestivum
  Clone ID: LIB31-008-Q1-E1-E6
ccggtccgaacattcccgggtcgactacatgacacttcaccattatttgggcctagaggaaggcattgggaagtaataagtagatgatgggttgctagagtgacagaagcttaaaccctagtttatgagttgcttcgtaaggggctgatttggatccacatgtttcatgctatggttaggtttaccataatacttttgttgtagttgcggatgcttgcaatagaggttaaccataagtgggatgcttgtccaattaaggacatcacccaagcaccggtccacccacataccaaattatcaaagtaccgaatgcgaatcatatgaatgtgatgaaaactagcttgacgatattcccatgtgtcctcgggagcgcttttctctatataagagtttgtccaggcttgtccttttctacaaaaaggattgggccaccttgctgcactttatttactttt

SEQ ID NO: 9775 - DNA, 394 bp, Triticum aestivum
  Clone ID: LIB31-008-Q1-E1-F12
cgggtcaggaattcacgggaacagtttaccctccaaacacccggagcggtgtgacgactgggttacaagtgaacacatcatgactttcagcagttggctggcaacacgtctcacaggtgagaacactgtttgtgctgagctatactcgttgtccaggggaccatcttcgactgtattgacttacaacggatatgagataaatgggaatgcattttacacgatcgcccaagatcaatagagcatcaaccacaacatcggtgttcgctttgatgcagcaatcaagatgggaaaggacacatattatggttacatagtggacatatcggaacttgactacggacatgattttaaggtccctttgattaaatgcaaatacgtcaatctgtcacgaagc

SEQ ID NO: 9776 - DNA, 452 bp, Triticum aestivum
  Clone ID: LIB31-008-Q1-E1-F2
gggaccactacatgacacttcaccattgtttgggcccagaggaattcattggtaagtaataagtagatgatgggttgctaaagtgacagaagcttaaaccctagtttatgtgttgcttcgtaaggggctgatttggatccatatgtttcatgttatggttaggtttaccttaatacttctgttgtagttgtggatgcttgcaataggggctaatcataagtgggatgcttgtccaagtaaggacagtaccaaagcaccagtccacccacatatcaaattatcaaagtataacaccacgatgcggctatatctcctacgtgccggagcacaacttagaggcataaccgcatagtaggcatgtcgcaagaggggtaatctttacacatcccatgtactgaacaacaaagagataaagagttggcttacaatcggcacttcacacaataaataaa

SEQ ID NO: 9777 - DNA, 465 bp, Triticum aestivum
  Clone ID: LIB31-008-Q1-E1-G6
cgcctgcctataccggtccgacattcccgggtccacgctccatttggacctgaggctcaggggtggaactatgatcaaggtgaagacacttactgggaaggaaatcgagattgatattgagcccactgacacaattgatagaatcaaggaacgtgttgaggagaaagagggtattccacctgttcaacagaggctcatctatgctgggaagcaactcgctgatgacaaaactgctaaggactacaacattgaaggtggttcagtgctccatcttgtgcttgctctgaggggcggtcagtagatgcaacctcgacgtggaccgtataggccatttctaccagaacttgttgcagacctggatctgtgaatttgccggttgattgaagtgccatgtaattgacgcatttgtgaagtcagctgtcacctgtacttggatggaattggttgaactaaatgcttatccgc

SEQ ID NO: 9778 - DNA, 478 bp, Triticum aestivum
  Clone ID: LIB31-008-Q1-E1-H8
acgcctgcctataccggtccgaccttcccgggtccacgagttgatcacgaaggctgcgaagaagggtcagatgccctcgcagatcggtgttctgctccgtgaccagcacggtatcccccttgtgaagagcgttaccggaagcaagatcctccgcatcctcaaggctcatggcctggcgccggaaatcccagaggatctgtactttttgattaagaaggctgtggccattaggaagcatcttgagaggaacaggaaggacaaggactccaaattcaggctcattcttgttgagagcaggatccaccgtcttgcccgttactacaagcgcaccaagaagctcccgcccacctggaagtacgagtctaccactgccagcactctggtggcttaagagggctcttcatctggtgtgctcttaccggcttcaggatggtcttgttctacatattatcaatttcatgtaacgtttttgagtttg

SEQ ID NO: 9779 - DNA, 347 bp, Triticum aestivum
  Clone ID: LIB31-008-Q1-E1-H9
cccacgcgtcagatgagttcctgcaacttcgaaaaatttaaaaccatgaaacatctattactgctacttttctgtgcttttatagttcaggcccaatttcctactgactatgacgagggacaagatgacagacctaaggtaagtttgggtgcccgcggtcatcggccctatgacaagaagaaggaagaggcccccagcctgacacctgtgccccctcccatcaaccgacgtggctatcgggctcgtcccgccacagcaactgtgggccataagaaagtggagagaaagccccctgacgctgatggctgcctgcacgcggacccggatctgggtgtgttgtgtcctac

SEQ ID NO: 9780 - DNA, 446 bp, Triticum aestivum
  Clone ID: LIB31-010-Q1-E1-A5
ccggtcctgaactcccgggtcgacaacagcgggacgatcgttgggatcaaatgcaaagatggaattgtccttggtgtggagaagctgataacatcaaagatgatacttgctgggtcgaaccggagacttcattccgtgcaccggaactctggcttggctgtggctgggttagcagcagacggtaggcagatagtctcaagagcaaagtcagaagcagccaactatgaaaaggtatacggagaacccatgcctgtaaaggaattagctgatcgtgttgctagctatgttcatctgtgtacactctactggtggctcaggccttttggctgtggagttattcttggaggctatgatagggaatgcatcgttgacgttgccaagataatttatggtgtacacgacgaagcgaaagacagatcttttgagctggaactgagctgggtatg

SEQ ID NO: 9781 - DNA, 473 bp, Triticum aestivum
  unsure at all n locations
  Clone ID: LIB31-010-Q1-E1-B1
taccggctcgaaattcncgagtcgacggagaccacacagttgaacacgatgcgggagatcaaggtgcagaagctcgtcctcaacatctccgtcggcgagagcggcgatcgcctcactcgagctgccaaggtgttggagcagctgatcgggcagtcgccagttttctccaaggcgaggtacactgtcaggtctttcggcattcgtcgtaatgagaagattgcctgctatgtgacgatcaagggtgagaaggcaatgcagcttctcgagagtgggctgaaagtgaaggagtacgacctcttgacgaggaacttcagtgacactggttgctttgggtttgggattcatgagcacattgatcttggcatgacgtatgacccagcaaccggcatctatggtatggacttcttcgtgggtctggagcgagctggataccgcgtctcccgccggggccgatgcaagggccgtgttgggat

SEQ ID NO: 9782 - DNA, 428 bp, Triticum aestivum
  Clone ID: LIB31-010-Q1-E1-B10
cgcctgtcaggtacggctccagaattcccaggtcgaccgcgtcttcttcgccaacgacacctatctgcccagcacaatgcctgcacttttggtgcaatacaggcaggatgaactcaacaatctccgaggcgacggcacgaccggaaagtacgaggagtgggaccgtgtgtaccgctatgactactacaacgacctcggtgagccggacaagggccatccgcgcccggttctcggcggcacccaagaactcccctatccccgtcgttgcagaactggccgacccccaacaaaaacagaccctagatcagagagcagaattcctcagtacaagatacaggaggccctgaacatctatgtcccgcgcgatgagcgctttggccacctcaagctgtctgacttccttggctactctctcaaggccatcaccg

SEQ ID NO: 9783 - DNA, 72 bp, Triticum aestivum
  Clone ID: LIB31-010-Q1-E1-B11
cgcgtagtacgtcgctacaccctatagtgagtcgtattaagtcggcagacgggagaccggagtttcgatgca

SEQ ID NO: 9784 - DNA, 466 bp, Triticum aestivum
  Clone ID: LIB31-010-Q1-E1-B5
cgcctgcaggtaccggtccagaattcccgggcaatctatccccctaggagcatgtgcgtagtactttgttttcaatggcttgttgatttttgcaataagtatatgagttcttcatgactaatgttgagtccatggattatacgcactctcacccttcaaccattgctagcctcttgtgtcgcgcaactttcgccggtaccatacacccacgatataccttcctcaaaaaagacaccatacctacctattatggcatttccatagccattccgagatatattgccatgcaactttccatcattccttttattatgatacgcatcatcattgttatattgcctttgcatgatcatgtagttgacatcatatttgtggcaaagccaccttcataattctttcatacatgtcactcttgattcattgcatattccggtacaccgccggaggcattcatatacagacatac

SEQ ID NO: 9785 - DNA, 471 bp, Triticum aestivum
  Clone ID: LIB31-010-Q1-E1-B6
acgccggccggtaacggtcctaaattcccgggtcgacgcccttgaagatcccgctgggtgacaacagaagttttttgcttatcgtcttctatctgagtgctctaggttcatgttgggagtctttttcttttgaaaactgttggtgttgtggactgtgcctgatgatggcgtacgtaatatgtgcggtacctgtttaggtgctcgcagtgcagatttgggtgacattcaagttttcgccccatgatctgccgttcctgatgacgggcgcacatagtgggtttcttgttattgctctgaactcgcgtttactctttctctagtcctgatagtttcagttcctgagacagtgtatttccgttatgaaagtaatggaaagaggaaaatccggttcgacaaagacgtctatggtgttggctggggagcctttatatttgccagctttctttaccggtttgttcgcaaagcgatttc

SEQ ID NO: 9786 - DNA, 421 bp, Triticum aestivum
  Clone ID: LIB31-010-Q1-E1-B9
acacctgtcagtacggctccgagaattccgggtcgacatccatgcataactaaaggacgggaaataggatgggacagcgagagagaggagagagagagggagggagaggggtagagtgctggatgggtgatggagttgcttctcgaagatggtgggagaggcctagtagacaaactgagggtggaactgcaatattatcaataagagtggggatgtgtttctgtgtgtgcctgtgcgtgatagatctgtcgggacacatccatggatgatgaaggggaaccatgtgtttggtaagctaacctaactagatcggtagattaattgttgtttgtcggaggaagggagagacataactaatgaggtagatcgatcgacgcgtgggaaaaaacgagttataaggacctaactagctatatgtata

SEQ ID NO: 9787 - DNA, 449 bp, Triticum aestivum
  unsure at all n locations
  Clone ID: LIB31-010-Q1-E1-C1
cgcctgcttgtaccggcccgaaattcncgagtcgacctgcacatccacgtctacgaggaaatcgtctacataggccactacaaggccagcgaggacagaaagacgctggccttcttccagcggttggaatctttggacgccattgttcagaagcacgtcgacctgaccacgagagacgctgctacttagctgccgttcggtgggccggcgccctgagtcgaagaggtggacatcatcgatggatgcatctcttcttcttgcctcctgttaccagcactgcatcgcctcgtggccttaatgttttattagtatagtactccctccattcccaaatataaatctttctagagattccagcgattgactacatacggagcaaaatgagtgaatctacactctaagatatgtctacatacatccgtatgttggagtccatttgaaatacctaa

SEQ ID NO: 9788 - DNA, 54 bp, Triticum aestivum
  Clone ID: LIB31-010-Q1-E1-C11
acatcactacaccctatagtgagtcgtattaaccagcgagcgttccgaggtcgg

SEQ ID NO: 9789 - DNA, 388 bp, Triticum aestivum
  Clone ID: LIB31-010-Q1-E1-C5
gtaccggtccagaattcccgggtcgaccaagctgaattactattgaataatatgttgactaatgaaaataattggactcttcctgagccaattcctgaggcaattcctgaaccaattgagccaactcctgagcctattcctaaacccagtcctaagaagagaggtgttctatttctcagtcctgaagatatgcaagaggcaaagaaatcaatgaaagaaaaaggtataaaagctgtagatgttaagaatttaccacctattgaagaaatacatggtcttaatataccgcctgtcgaagaaacacattgtcttgataacccgacacaggtagtaaaggtaaattctctctatagatatgataaagttgaaatcccgtctaataaatttc

SEQ ID NO: 9790 - DNA, 388 bp, Triticum aestivum
  Clone ID: LIB31-010-Q1-E1-C8
actcgtagtacatcacaacaccctatactgagtcgtattaagcgatgaatgagatcaatgcagctgcaaggatgagggtggctgcaaacgagaaggcggaggctgagaagattgtccagatcaagcgtgccgagggtgaatcagaggccaagtacctgtctggcctcggtatcgcccgccagcgccaggccattgtggatggcctgagggacagcgtcctgagcttctcagtcaatgtgcctggcaccactgcaaaggatgtgatggacatggtgctgatcacccagtactttgatactatgaaagaggtcggcgcgtcctccaagtcctcggcggtgttcatcccccatggccctggcgcggtgcgcgacatcgccacgcagatccg

SEQ ID NO: 9791 - DNA, 367 bp, Triticum aestivum
  unsure at all n locations
  Clone ID: LIB31-010-Q1-E1-D10
attcccagggtcgacctggtgcacgagatcgccgaggccgtttcggagttcgcggccgtggtcacaccggagcccagccccgaagaaggccaggccggaaggttgggactggatagggctgcgccggcgaagaagacgcccaacttctcgcagcgggagatttccttcctgctgaggctcatacccgagctcgtacagtagcgtgtcctcttctcggatagtagtatccacggtgcgcccgtgtaggttgaccaatctttgacacctcggaactgaaaccccaaggcccggatgcggcatgtaaatcagggccaccacgacccgtccgattgtttgcatcanggtgaaatccactagtgtttgtgcc

SEQ ID NO: 9792 - DNA, 395 bp, Triticum aestivum
  unsure at all n locations
  Clone ID: LIB31-010-Q1-E1-D2
cgcctgtcggtaccgctccgagaattccaggtcgactccgangagctcaccgtcgangagcgcaaccttctatcggttgcttacaagaatgttattggtgcccgccgtgcctcgtggcgcatcatttcctccatcgagcagaangaagagagccgtggcaatgaggaccgtgtcacactcatcaangactaccgtggaaagattgaggttgagctcactaagatctgtgatggtatcctcaagcttcttgattcccaccttgtcccctcatccactgctccagagtccaaggtcctctacctaaagatgaagggtgattactacangtaccttgcggagttcaagagtggaactgaaaggaaagatgctgctgagaacaacatggtggcatacaa

SEQ ID NO: 9793 - DNA, 463 bp, Triticum aestivum
  Clone ID: LIB31-010-Q1-E1-D6
gtaccggtccggaattcccgggtcgacacagactccactggctcactatagcatagcaccctcacaaatgggaccctatagatactcgatccgtcaatctctggtggatgctccatcttggaacgatactcccaccaccgctgcctcacgataggattcggtgaatttctttgcaccatggcccagaggagcagctctatgtactcccgcgcgactctcttcgggagtatagccaccttttcgctctgttgcagatatttggccatggatgtcgccgtcatcgctagttggtccttgttgtcaaaccaagactgtatctccaacatcctagctagcttcacaaggtcgcgttctgcaatcctcatgtatgtgttgtactcctccatcgatctacttctccacagcaccttcactcgccggtggtggtttttgaatgggatacgagaggagtggtgctggtttt

SEQ ID NO: 9794 - DNA, 377 bp, Triticum aestivum
  Clone ID: LIB31-010-Q1-E1-D7
tcgttgttcaacactacacgctatagtgagtcgtattatatgattcacaagatgacagatcaaccactgctctcaacataaacgaccctgggcttaattctggcctttagattatgatttggttttcgtctcaagtatagtatgtttatgaatagatcacgtactgcttacatgtgtgtccagttgtcccaacttgtttctctattgaagattggaactgtttttttattagaacgaacagacatgcccgtacgttgcaccatgagaactaaatattatgtgctcgtctatcaccaatctcataatgcgaccgtcacttgtgtgcaaacaattagaagtgctgttttatacttgcgcttgtccctaatgggcaatgt

SEQ ID NO: 9795 - DNA, 283 bp, Triticum aestivum
  Clone ID: LIB31-010-Q1-E1-D8
acgcgtagtacaacgcaacaccctatagtgagtcgtattataaccgactagtcagtagcacagaacgagcgatgatagcgaaattagggaatcgcctgaaagatggcgaaagccgtatatgtggactgagtctttggacgatgctttgcgacaagtttcccaaagagcaggatccagagttcagtaatgaagcatatgtgagcccagtacttcacatctcgaaatcatgcgcaacgtttgcgcttatccctagcgattgcttatgggatgtcattagcgcgaa

SEQ ID NO: 9796 - DNA, 452 bp, Triticum aestivum
  Clone ID: LIB31-010-Q1-E1-D9
gtaccgctccgagaattcccagggtcgacttccaccaaagcgaaatccaccatctcatcgaaagacgggacacctttgcctctatcaagtggtatcagatttccaggttgctcggtgagattttacagtttttcgtagtttagatcgggtctgttcttcatacctacagtccacgaaaaagccacaaaaaaaattagggttagttcatcatatccgaaccaatctgagcctttgcataatctttttagggttttgctttgttgaatttgccgttgcatcgtcggtctagttgctggtcttagagtctagtcttttagagtttcgagttctggtcataagttgtcacaccgccgccgcaccatcatcatcgcccctgccatctaccaccaccgctccgaatccgtatccatataccaccaccaatccgtgtccatataccaccaccgattcat

SEQ ID NO: 9797 - DNA, 453 bp, Triticum aestivum
  Clone ID: LIB31-010-Q1-E1-E11
acgcctgtaggtacgcctccgagaattccagggtcgacacgcatctcgttgagaaaattctcaacccctcttaccttgataatatggtaagcacgttcagtaaccttcaggggatactgaagtccgcagggacatccaccaccgcgtgggtcggcgaagctggaggggcttacaacagtggccaccaccttgtaactgatgcatttgtgttcagtttctggtacctggatcaactcgggatgtccgccaagtacgacacaaagagttattgcaggcaaatcttggttggagggaattacggcctgctcaacacaacaacatttgaaccaaatcctgattactacagtgctctgctatggcatcgcctcatgggaaccaaggttctctccacgacattcaacggcacaaacaagattcgtgcttatacacattgctcaaaagattcggaaggga

SEQ ID NO: 9798 - DNA, 459 bp, Triticum aestivum
  unsure at all n locations
  Clone ID: LIB31-010-Q1-E1-E4
cgcctgtccgtaccgctccgaaattcncaggtcgacccgctttttttgatgtaatttttttttttttttgctactttcctctgtttttcatcgcttttttccttttagcattttttaccaggccgtacctgtaaacttcagattatctacaagatgtgaacagaagatacagatgcaaccgaagtgaccaggtgacatactactccaggtggaattaaaggcaagtgtggttacgcaccaccatacgtgcaacagtagcaggtancgttgtctggacacaggagtagtcttggtggagtattacgatgcaacgtgcagttggggacgcgacaggcggaaaggcggcaggcgcgacaatcggcaacaagtgaaacaggctgatgcaatcttgctttgtttttctcagattatgaatgagcttgcgatagaaaaagtacggcggacaaaaacagattgatc

SEQ ID NO: 9799 - DNA, 236 bp, Triticum aestivum
  Clone ID: LIB31-010-Q1-E1-E6
tactgagactcatagttcaacattacaccctatagtgagtcgtattagaccgcggctaagtgttccgacttggaaaaggtcgtcaccaggattattggcgtctcgacctcggtttcggaagcagtaaattcagctgggattagtctttctccggcgacaactgtaacactatcatgcaatatttcatgaagatcacatgagttgtgaatttagtacaatttaatcgctaggtttct

SEQ ID NO: 9800 - DNA, 278 bp, Triticum aestivum
  Clone ID: LIB31-010-Q1-E1-E7
atagtgagtcgtattacaaccggtcaggctagcagcgtgcaagtgtgacctgagtgggtctggttaagtgtgtggcgttgtgtgtttgtgtgtatggactaggtggtcctggcttgggggcagatctgaacagaagaggaaatagacggaaccgtctgaatcccagagacacggtaagacgttggagggaaatagaggcgctctagaggatctaagcgtacagtacgcgtgcatggcaagtcatagctcttcgatagtgtcagctaaattcagttcag

SEQ ID NO: 9801 - DNA, 461 bp, Triticum aestivum
  Clone ID: LIB31-010-Q1-E1-F3
acgcctgcccgtaccggctcgtagattcccgggtccacaggatggttgcatggtccaaacatatcaacgtgtcagacccgctcgaggaaggttgcaagcttgggccagttgttagtgaaggacagtatgagaagatcaagaagtttgtagcgaatgctaaaagtgaaggtgccaccattctgactgggggtgtcatgcccaagcatctggagaaaggtttcttcattgaacccacaatcatcactgacatcaacacatcaatggagatttggagggaggaagtctttggtccagtcctctgtgtgaaggaattttctaccgaagaggaagccatcgaactggccaatgatactcattatggtctggctggtgccgtgatttctggtgaccgtgagcgatgccagagattagccgaggagattgacgctggatgcatttgggtgaactgctcgcaggcttgc

SEQ ID NO: 9802 - DNA, 470 bp, Triticum aestivum
  unsure at all n locations
  Clone ID: LIB31-010-Q1-E1-F4
cgcctgcccgtaccggtcctaaattcncgggtcgacggctacttctcattatctctgctacagggatgacaatcagtcttctcgttgtttctgtgtcattttttgtgaaggacaacatagaggaagcttctcatttacactttgtgatgagtatgctttcactggctggacttgtggcatttgtgcttgcattttcccttggcatgggagccatcccatggattataatgtctgagattcttcctgttaacatcaagagccttgccggaagcaccgccacccttgcaaactggatgacgtcgtggctcatcacgatgaccgcgagcttgatgctaaactggagcaacggaggaacctttgctatatacgccgcggtgtccatgggcaccctcctctttgtgtgcctgtgtgtgccggagaccaagggaagggacctggaagagatcgcgttctcgttccgctgaagcccg

SEQ ID NO: 9803 - DNA, 201 bp, Triticum aestivum
  Clone ID: LIB31-010-Q1-E1-F5
cactactccctatagctgagtcgtattatagcaacctcaaaatccaatctagagccctattctgacatcttgttggatgggaacacgaccatggaagggttcatcatcctcattggggctcctgggatgaggcactactagttcaccacataactatctgtccgtacgcactcatcccaattcctgattccctctctttat

SEQ ID NO: 9804 - DNA, 392 bp, Triticum aestivum
  Clone ID: LIB31-010-Q1-E1-F8
acgcctgcaggttacggtccagaactcccgggtcgacggctcatcgccatgtgctcgatttcagataggtcccacgcactcactcccgtgtatgaggctgctacaagatctggcactgaagatcaaccatccccttctccaaaaactgattcagaagagtccgataccaaggatgtggtcttaccaggagtcaatctcatatttgatggcgctcagctgcacccgttcgacattggcgcttgcctccacgcccgccaacccttgtcattgataactgatgcgtcggacgcgtcattggccatgacatgactgatatgcatctcagcacgttgccatcacaatttctgttccgtttaatctatgtgcggaattgaatattggtgtagacgact

SEQ ID NO: 9805 - DNA, 397 bp, Triticum aestivum
  Clone ID: LIB31-010-Q1-E1-G10
gcctgcaggtaccgctccgagaattcccaggtcgacgcagtggagttcttttgagcacaagagggcgatccctaaggttaagctgttctgatagcaataccttacacctgaacatccggtggacattatcgatcaacgacgacaactggtgaaagtacatatggtggctgacttaggcattatggatttaagactccggctatggcatggcgaagtcatacccagcagctacatcgggcttgtcaaccggatgatcaatacccacctgatcttgatcgtcatggcttgcatcaagatcacctcacgatgtacatctgccatgatcactcagcctcgtctcgatcctgacaagtgatgtctcccctgacgacaccttgcgtcttctgccccgccaagc

SEQ ID NO: 9806 - DNA, 439 bp, Triticum aestivum
  Clone ID: LIB31-010-Q1-E1-G2
cccgggtcgacacagcccaatatcgcagaataaacttcagagtatgttgtttctgtcatctgcattcagcacaaaatctaacgcactacacaacatccatctaaagcacagcactaagtcttcttccttcctttcccttcgccgacatcgcacgactcaactgccgccatggacgcaggaacaaacctcagatttgttctgacctctttgtagttcttctgctcacatttcttccttccaaagtccttctccagtcggccaaacatccactacagaaaaactggaaaaatggatgagttctcatttttcacagatctgtcaagaaggacaaaacgaagaaaagaaaaaaggggagagaagaacctgtttcacgtgtcagaactaggtagttaaagcagaataccacccagaaaatcaaaagatatataaacaatgcgtg

SEQ ID NO: 9807 - DNA, 483 bp, Triticum aestivum
  unsure at all n locations
  Clone ID: LIB31-010-Q1-E1-G4
cgcctgtccgtaccgctccgaaattcncgaggtcgacggccatgttggaaactaaggcttctccatagcccgcctcaatctccacctcgccctccttgctggtatacatgcatctcattcagtctgttcgttgtacaacttgtagtgtccacaattcagaagtaggagttcacagaaaactgcttctctgaatcactcatcgttcagtttcgttctcttgtggttaattcaaagatccattgccacaaatgtgaatatgagtgcaaatatgcttgtcttttgaactctggaactgttgcctatacatgcctattattgctgaatatgatggaaatgtggatgtttaagacggagtatttatcaggaagaagcttataggacttccaataagcaagaagtttcatataattttcctggatgcaataggatgaactttcattttattggaacgtgctatagtataaatttcaaagacccacttca

SEQ ID NO: 9808 - DNA, 478 bp, Triticum aestivum
  Clone ID: LIB31-010-Q1-E1-G5
cgcctgccggtaacggtccgaaattcccgggtcgacaagaattggtcatttgcgtggttagtcataaaatcctacataaaatttatggatcactgaatatgatatgtttgattccttgcaatagttttgcgatatagagatgataatatgtgggaggtactagtagatggttgtgtttagtaataatattttgtgttaaggtttgtgattcccgaagcatgcacgtttagtctctcattatgctatgaagttggagcatgatttattattgattgtcttccttatgagtggcgggcggggacgagagatggtattttcctaccaatctatccccctaagggcatgcgtagtagtactttgctttgagggataataaacttttgcaataagtatatgagttctttatgactaatgtcagtccatggattatacacactcttacctttccacaatttgctagcctctacggtaccgtgca

SEQ ID NO: 9809 - DNA, 451 bp, Triticum aestivum
  Clone ID: LIB31-010-Q1-E1-G7
cgcctgcaggtaacggtccgaaattcccgggtcgacatcgagccggatgcgcatgtcaagcaggcgatgaatgagatcaatgcagctgcaaggatgagggtggctgcaaacgagaaggcggaggctgagaagattgtccagatcaagcgtgccgaaggtgaagcagaggccaagtacctgtctggcctcggtatcgcccgccagcgccaggccattgtggatggcctgagggacagcgtcctgggcttctcagtcaacgtgcctggcaccactgcaaaggatgtgatggacatggtgctgatcacccagtactttgatactatgaaagagatcggcgcatcctccaagtcctcggcggtgttcatcccccatggccctggtgcggtgcgcgacatcgccacgcagatccgcgatggtcttcttcaaggccagtctgcctctgacaactagc

SEQ ID NO: 9810 - DNA, 400 bp, Triticum aestivum
  Clone ID: LIB31-010-Q1-E1-H10
cctgtaagtacgctccgaaattcccaggtcgacctcacggccgacaagaagaaaataaaggctgctgtcaagaaaatgtatgacattcaggccaagaaggttaacaccctcatcaggcctgatggcaagaacaacgcgtacgtgaagctgacacgagactacgatgctcttgacgtggccaacaaaatcgggatcatataagccagagggagggtcctgcagtaggcacttgtgtcgtgggttcttatgttattggaattttgtagttgttacttagcaaagggccttaatggttccattgcctaccatatcgctgcacactttcatgaatttgatgcaatcgaactgacttgtgttgatactaatttgagctttgcgtttggtcttacctaagtcaggg

SEQ ID NO: 9811 - DNA, 453 bp, Triticum aestivum
  unsure at all n locations
  Clone ID: LIB31-010-Q1-E1-H3
acgcctgtccgtaccgctccgagattcncgaggtcgacaccggcttgcttcccaccatgtctcccgccaccctgacgacgagcacggtgtctgctccacactaccctagtacaacatggtgctcagatctgtcatggaggaaacgcgatgcaggtgtgatttttccatacaaagaagctctccttttctgcttgatgaaaactcacaagatgctatcgcgttatcttctatcttctccttgctgcacattttccctaccttccaccgagtcagtacttggatccaagtctttcttattgctacttatttttattttgctactaaattgatgcaggtgctaccagtgaaaggattggagattggttctagtagttgtaggttcgtttggaattcataatgctcatgatttgcaaagcctatcagccagaacacgttgatgcatagcattaaatg

SEQ ID NO: 9812 - DNA, 482 bp, Triticum aestivum
  Clone ID: LIB31-010-Q1-E1-H7
cgcctgcaggtaacggtccgaaattcccgggtcgactcaggaggttttacgcattccctgcatgattagcataacgaatatatttcatccaacagacaagatcaccactcatcatacccctcatgccatgccggacacactcgtctcgacgaggaactggggacaagctcgggtctacccaagacagagactttcccgttttccttccggtaggcacgaaaggcacacgaggatgatcattatcacaagcatgtccatttccaacagcaaagaagtttccaataagcatgcatgcaaatgatcacatcaccacatagaatagcgagttctacgtattgaggtggtgtcataatcgtgtcaaacaatacatgcaaaatattatgccagggttcagaatgcttgccttcaaggtgtggaaatgcagggtgcactccaaaacttttgaaagctttctcctctctccaaaaatcctatttagaatg

SEQ ID NO: 9813 - DNA, 442 bp, Triticum aestivum
  Clone ID: LIB31-010-Q1-E1-H8
attcccgggtcgaccgggctattggtcagcttgcaaggctcctgtgggaagctgagaagtcggggcactaccagtacttcctctgtgtcactggagaccactctactcctgttgagtacggagaccacagctttgagcctgtcccgtttgcgatatgccggctgagagatttcgtgggagcgattggggagggcaatgtgatgaatacccccctcgacgatttcccgctgccttcggttaaatccggagaagatttaactgatgattcagaaccagcggaacacaagcctgaggagcgtaaagcttttagcggcgatacagtgtgtgaatacaccgagattgctgctgcaaggggctgccttgggcggttccctggaagtgagatgatgggcatcatcaagaagttcatgaaagcaaaggaacattaacgccagttcgattg

SEQ ID NO: 9814 - DNA, 348 bp, Triticum aestivum
  Clone ID: LIB31-011-Q1-E1-A1
acgcctgccggtaccggtccgaaattcccgggtcgactccgaggaactcactgtgggtgaacgcagtctcatctccggcggatataaaaatgtcaatggagacagccgtgcctcacggcgcatcatgtcctcgattgaagaaactgaggaaagacctggcatccatgaccgggtcagactcatcaaggaagaacatcggaagatatagactgagcttaacaggatctgtgatagcatcatcaatctgctcgaaacccaccttataccgtcatccactgcccctgaatccacagtcccttatcgatctatgggtgatgactactactcgtatcgtgcccaattcatgag

SEQ ID NO: 9815 - DNA, 437 bp, Triticum aestivum
  unsure at all n locations
  Clone ID: LIB31-011-Q1-E1-A3
tagccgtccgaaattcacgggtccacgaggcttttgaggtggctcgtaatagcgttgaacttctttccacagtgctatcatcatctccacaaaaagaggctctagaggatgacttgactaccaccctggtccagcaatgccgacagtgtcaatacacgatccggagaatcgttgaaactgcaggtgataatgaggctcaactcttcgaggcactgagtatccacgatgaactccagaaagttctgtccaagtacgaagacctcaaggagcccatcgtcgcagagcctgagccagaaccagcgatgattccagtcacggtggagcctgaggaatcnccacgcgctgttggcaaagacaccccctcgaggaaatcagctgggtccggtggtcgctctagcggcggggatgacttgcttcaggatctcgacgacatgatc

SEQ ID NO: 9816 - DNA, 455 bp, Triticum aestivum
  Clone ID: LIB31-011-Q1-E1-A4
ttcacgggtcgactcccctagcgtttctggaatactagggtatttagagcaaagagccggtgcgggaggccaccgaggtgggcataacccaccagggcgcgcccaggtgggttgtgcccccctcgggcacccctcttgtattttcccaggcgcgcctaggtgggttgtgccctcctcaggcatccctctggtatttctttggcccatcttgtgtctactggtcgagaaaaatcaccaaaaagttttgctgcatttggactccgtttggtattgatttcccacgaagtaaaaaacaagcaaaaaaagaacaactggccctgggcactatgtcaataggttagttccaaaaattggtataaagttgctataaaatgattgtaaaacatccaagaatgataatataacagcatggaacaataaaaaattatagatacgttggagacgtatcagcattc

SEQ ID NO: 9817 - DNA, 136 bp, Triticum aestivum
  Clone ID: LIB31-011-Q1-E1-A5
gttagtcccaaaagtaatataaaagtgcttagtaaagcccattaaacatctaagatggataatataatggcatgaatacttcataaattatagatacgttggagacgtatcagaagcatatacccaaacctgcccc

SEQ ID NO: 9818 - DNA, 472 bp, Triticum aestivum
  unsure at all n locations
  Clone ID: LIB31-011-Q1-E1-A6
accctgccggtaccagtccgaaattcccgggtcgacacatgcattctggtcagcttcatcttggaggctgcggtgacgtatgcgacgctcgtctagtggagctactgccgatggtcgaggcatcgttggcagtctgcgccatcaagttcggggtgctcaggggggaaccccagatctgggtcttccggatcggatgatgatggcgttctatcactttcccttctgggggcatcgtcttggagcaagtgctggctggagggatggtggagcggtgtttcatcccaaactttgatggcggcggagatcgatggcatggcgctgtggagactcggcgtccaacatgcggagatgggctcgcgcaagangaggttgctgtctggcgtcatggtgacgtcgatggcagaatggccagacagggtanaagccctaatatgatctngagacatgtggaagatggcggccacgacacacg

SEQ ID NO: 9819 - DNA, 438 bp, Triticum aestivum
  Clone ID: LIB31-011-Q1-E1-A7
tccgaaattcccgggtcgactatcacgatgtccggggtcttgtcgcgaatgatccgcatctccatactcagcgaaaatagccgaacgaagttgtagtgcagcggatgaaggttcaacatagcgtggatgtcatcaaaccgcaggacgatcgtacccccgatggagttatccacaaagcccttgccctatggcaccttggccgcgaaaaccgggtatgccacatccttctctccgagacgccgcttctccaaagaaagaacactgtcatgcagactccgcatagcaccggttgcagcattgagcatatttctcagtagcatcagcctacccgccacatgcaccctcctcgagatatcctcaggtgaaggtggcccatcctgagcacgaatcgtactcggtgccggctggcccgcaaccttgttagtctttcttttgcgt

SEQ ID NO: 9820 - DNA, 471 bp, Triticum aestivum
  Clone ID: LIB31-011-Q1-E1-B1
ggtacgcctgccggtagccgtccgaaattcacgggtcgacatactttttgcacttcagattcattcagctattaacatgtatttctccatcagctgctgtttagagcatctaccattatgatagtcatcatagtggattgctgtagagttttatgtacatgagattggattgttaaatctctttcacacgccaagtagataaagcggagcaaattattacatccgtttgaatatctggactgcgcttatgtattttctgagacaacttatgtttgcttctcacactaatgattttgtttgtttggggaaacaagttaccatagccgccttgtcacctaagtttgctctgtattttgatgaagccttggtttcagcaagaagttagaggaggaagaagtaaagcgagcaatagagaatggatggattaaagactcaataagagatgttgaagaaatctgctgatgcatttat

SEQ ID NO: 9821 - DNA, 467 bp, Triticum aestivum
  Clone ID: LIB31-011-Q1-E1-B2
acgcctgcccgtagcggtccgagattcacgggtcgacggagaagaaacagttgaacacgatgcgggagatcaaggtgcagaagctcgtcctcaacatctccgtcggcgagagcggcgatcgcctcactcgagctgccaaggtgttggagcagctgagcgggcagtcgccagttttctccaaggcgaggtacactgtcaggtctttcggcattcgtcgtaatgagaagattgcctgctatgtgacgatcaggggtgagaaggcaatgcagcttctcgagagtgggctgaaggtgaaggagtacgagctcttgaggaggaacttcagtgacactggttgctttgggtttggtattcaggagcacattgatcttggcatgaagtatgacccatcaaccggcatctatggtatggacttcttcgtggttctggagcgagctggataccgcgtctcccgccggcgccgatgc

SEQ ID NO: 9822 - DNA, 378 bp, Triticum aestivum
  Clone ID: LIB31-011-Q1-E1-B3
ttcacgggtcgaccaggtggcgctgcgccgaggtgctgaggctatgcaactaggctgtgatgagcatgcgacaagtacaggtcatcgattcgttaagacctcaggtgcgattgggatgcaaatcaactcattgccatctcgtgcacacacagctttgcatcacaaaatactcagtgtcgtagaagttaattgtagtcatagattcgacacatttgtacatccaaacaggtatgtgtgtcaataggtgttcctttcatcgcttgatatgaggatgatctacgtcaagggaggttacgtacttgagaagtctgcttctaccgacaaaaagtagtcgccgatctagaggattcaagcttaggtacacttgcattcgacctc

SEQ ID NO: 9823 - DNA, 447 bp, Triticum aestivum
  unsure at all n locations
  Clone ID: LIB31-011-Q1-E1-B6
tccgagactcgcgggtccacaagaaggatgcacagctctaggcgatgagtgagcagtgcaagttcatggctctgaaccgtccaaactagcagaagacagatacaccagataagaaacctgctcttgtccaactgatgtcacttacagttacattgccgcggcagtgaaaagaaaaagaagttatatccctgggggtccagaataaccgacgatgatgccctgttcccgggtccgtgattcgtagtgcaaacccaatcgtgaattgttgttaccttagatgtggtgtatcgaaatcgcaaccatgacagacatttgttgtatcttgattgtgtgtgtaaaggctgggcgcatttgcccggttttcataaatcattagagatgtataaccgcagttccatccaaaanaaaaaaaaaaaaaaaaaaaaaaaaagcggccgctctagagga

SEQ ID NO: 9824 - DNA, 435 bp, Triticum aestivum
  unsure at all n locations
  Clone ID: LIB31-011-Q1-E1-B7
cctgccggtaccaggtccgaaattcccgggtcgaccccgagttctactcggagcgcttcctcaagttcatccagaccgtcttccccgagaactcgtagcgcctcggccaaccatcactccggcgaacgctccagccccaggcatggcatgatcttccgccactggcgggcctgtgtacagaacgaggaacgagggcatccgcagagagtcttctggagggctggattattttcaagcataagcacaaaccatgtctttattctgggaataaaggtggcatggctgggttatggaggatggagaatccaccgacgtcncgctgtggaagagcatctgactttctgcgcgaatatatgtgtccgtcgagatcangagcaatgtgctgggcatctggaagatgtcgggaataaattcttggtctacttttgttgttcg

SEQ ID NO: 9825 - DNA, 449 bp, Triticum aestivum
  unsure at all n locations
  Clone ID: LIB31-011-Q1-E1-B8
attcccgggtcgacgcttcacctggtgctgcgcctccgcggcggcagcagaggtggataccccaagaaccttgagcccaacctccgcatccttgctcaaaagtacaatgagaacaaactagtctgccgcaggtgctatgcacgactacccaccagggccaccaactgccgtaagaagaagtgtggccataacaatcagctaagggaaaagaagaggtttatgtccaagtttgccaacgcttcctaaacgttggaaatatgctgaatcaaccgtctagcgtcatatatattggagtttaagttctgtcccttgtttgaagtcatgttggatttcgctgaatcgtctagcgtcgtcatatatagtggagtctaagatttgtccagttgatagtcctgttggattttgaacctatgtatgctttggaatatattatctatcanatatcctga

SEQ ID NO: 9826 - DNA, 425 bp, Triticum aestivum
  Clone ID: LIB31-011-Q1-E1-C1
ttcacgggtcgacattcgacgcaacgtgcgccaaagaggattttcgagacctcctatttgacaccttcagcgcaaggtaagttgtacaacgctcacagctcaccctcgtgggctaggcctagcggcgttggcacgctcactcacgcgtccgcctaagttttttctttcatttcacggtttggcggttgacacattgagcagttgacccgtttgatcagttgtctagttgcatgtttgactattgtctctgagagcagtttttttttgcgggtgtctcctagagcagttgacaattaacttttctttaaaaagttcatgaaatcaaaaaatgttcatgcatttgaagaaagttcacaattttgacaacaaagtttgtgaatttcgaaacaagttcgcgattctcacaagaggttcaagtttttttt

SEQ ID NO: 9827 - DNA, 454 bp, Triticum aestivum
  unsure at all n locations
  Clone ID: LIB31-011-Q1-E1-C2
ggtccgaaattcacgggtcgaccaattgatggaaaagcgaataattatgagattatctaggcatgatcatgtatataggcatcacgtccgcaacaagtagaccgactcctgcctgcatctactactattactccacacatcgaccgactcctgcctacatctagagtattaagttcataagaacagagtaatgcattaagcaaggtgacatgatgtagaggtatagactcaagcaatatgatataaactccatcttgttatactcgatggcaacaatacaatacatgccttgcaaccctttctgtcacttggtaaggacaccgcaagattgaacccaaagctaagcacttctcccatggcaagaaagatcaatctagtaggccaaaccaaactgataattcgaagagacttgcananggtactcaatcatacataanagaattcagagaagatc

SEQ ID NO: 9828 - DNA, 468 bp, Triticum aestivum
  Clone ID: LIB31-011-Q1-E1-C8
tacctgccgtacagtccaaaattcccgggtcgacccctgaatctcgaggacgagattttttcaagtgggggcgagttgtcacatccctagtctggtatgatctagactagctagtcatgtgtgcatcatgtttaaatttcatttaattctgaaatgaggatttgtgaaaccctcaggatcatctctgaaaatgacccaaataaaaattgttccaaaaaggtccaagaaaatgctcatgttgctctctgaaaatattggacagagataaaaatgaaaccaatatttttagtagctcataagtctttattttgggcatttggaattaatgcataattatttgcatttgatatatatttgttatatacataatatatgtccaaaaattatgccatttataaaggagctctggaatatataactagcctccataaaaattggcataagaaaataaaatgggttagtattttt

SEQ ID NO: 9829 - DNA, 372 bp, Triticum aestivum
  Clone ID: LIB31-011-Q1-E1-D1
tccgagaattcacgggtcgacctgctgtttctttgcactctcacaaggctcagtcacaaaggctttcagcgttgcatcgttttaagtctggtcaggtccctgtgttgatcgctaccgatgtggccagtcgtgggctggatatccaaactgttgatcttgttatcaactatgacatcccaaggtttccacgtgattatatccatagggttgggcgaactgcaagagctaccaggggagggctctcaatatgctttgtgacccagagggatatatgtctcctacatgagatagaagatgacgtggggaatcgattcagtgcatatgagtgcgacgacaaagaagtcaccaaagatattacaaaggtattcaaag

SEQ ID NO: 9830 - DNA, 479 bp, Triticum aestivum
  unsure at all n locations
  Clone ID: LIB31-011-Q1-E1-D2
acgcctgccggtagcggtccgaaattcacgggtcgacccaaagttaattactctggttgaatctgatcctttccatggttatgaaactgaaactgttgtggcacatcttactaaattgaatgacatagccaccctttttactcatgatgagaaaactcactattactttattctcaaattatttcctttctcattaaagggtgatgctaaatcttggtataatactcctgctcctggttgtgtgcgtagtccccaggatatgatttattacttctgtgaaaaatattttccagctcatatgaaacaagttgccttataggaaatatttaactttgtgcaaactaaagaagagaatctcccacaagcttgggggaggctttgccagttacttagttatttgcctgatcaccctcttaagaaaaatgaaatacttatcttctataatggactaaccgatgcttctanggacttcctagata

SEQ ID NO: 9831 - DNA, 441 bp, Triticum aestivum
  unsure at all n locations
  Clone ID: LIB31-011-Q1-E1-D3
acgcctgccggtagcggtccgaaattcacgggtcgacgcgaggcctcggattgatgttgtgaagcgcttggcctgcatagagggtgcccagatggccttcgcccgtgtcaagatgcaattggaaaagatgaaggccaccgaagtggcaaccacaggcccgcccgaaggcaaagatcatcgaaagccggagaggtacttcgatgacgtcctagaaggagcctgagtgataaagggtcaatgttctaaggacgtaatatttgattgaatgttttcaggttgtacaaactttgtcatgaacccatgttgttatatatctatgtttgcgccttttgttcaagcgatttttcctcctgtgcggccatttattgtactacatgggtgtttgacataacgcgtgaccacactttatccaacgtcttggtccgtaaaggangtgtccgc

SEQ ID NO: 9832 - DNA, 479 bp, Triticum aestivum
  Clone ID: LIB31-011-Q1-E1-D4
acgcttgccgtgacggtccgaaattcacgggtccactgacagtacaacatgggatactatcttaccgatggtatctatcctcagtgggcggcatttgtgaagaccatatccgagctacgtggcaataaacagagccactttgcaacaatgcaggaagcggttaggaaggatgtggagagggcatttggtgtgcttcaagcttgttggggaattttatggagcgctacaatgatgtgggaatcagaaactttgtggcagctgatgacatgttgtgctattctgcacaatatgattgtcgaggatgagggtgatggtgtagcccaaacccatgatttcgaagcacctagagaacaagttgaaatccccgaagatcaagatgtagctcaactgatgaactttctgcaaatgcatcagaatcttcaagatcagcaagtgcatatgcaactactcaatgatcttgcagagcacatgtggaccca

SEQ ID NO: 9833 - DNA, 447 bp, Triticum aestivum
  Clone ID: LIB31-011-Q1-E1-D5
cctgccggtaccggtccgagattcccgggtccaccccaggcttgaaaggaacttcaacgaggtcgaaatgttccgtatgattgaatctgcagccgcctgcattcgacactcgtcatcaaagaggcccagaatgagccaggtggtgcgggtcctcgatagcttagcggatatcgacctaaccaacggcgtccagccagggcagagcgagctcttcaacgtggcaaacacggcggacatcaggatgttccagcagatggtgcagggcaaccaggacgacagctccgccttcagccagtatagctggatcagtcgcagtagggccgacgccgaggccacctcctcaaactcccggatcttatgaccgtctttgtttccgtgctccacatgtacgtagccattcttctcgacccactgattcggccgggctgtgttatcgaccatcgaaaa

SEQ ID NO: 9834 - DNA, 452 bp, Triticum aestivum
  Clone ID: LIB31-011-Q1-E1-D6
attcccgggtcgaccaggctgagaaaatgggacttgactacatggatgttgaaagtctcaagaagatgaacaagaacaagaagcttgttaagaagctagccaagaagtaccatgctttcttggcatcagaggccataatcaagcagatccctcgtctccttggccctggtcttaacaaggcaggcaagtttcccactctggttagtcaccaggaatctcttgaagccaaggtcaacgagacaaaagctacagtcaagttccagctaaagaaggttctttgcatgggtgttgctgtatgcaacttgtcgatggacgagaagcagatctaacagaacatccaaatgagcgtcaacttccttgtgtccctcctgaagaagaattggcagaatgtgatgtgcctgtacgtgaagagcaccatggggaagcgtgtacgtgtgttctaagtgtgtgcg

SEQ ID NO: 9835 - DNA, 455 bp, Triticum aestivum
  Clone ID: LIB31-011-Q1-E1-D8
attcccgggtcgacggcgacacagtaatcggcgactcttacgcaatagcattgtatttggaggacaagtacccccaacgtcctcttttgcctcaagaccttaaaaagaaggccctgaatatccagatagcaagcattgtgtgttctggtattcaacctcttcacaatctcaccttggtgagatttatcgagcaaaaggttggaacaggggagagcatcccgtgggtccaacaacagattgatagaggtttcacagctgttgagaacatgatcaaaggctgtgctgggaagtttgctatgggagatgaagtccaactggcagatgtattccttgcaccccagatttttgctgcggtgactcgttatcaaacggacatgtcgaactatcccaccctcgcgatgctccatggtcagtatatgacacaccctgcatttgaagctgcgctcgctgaccgg

SEQ ID NO: 9836 - DNA, 471 bp, Triticum aestivum
  Clone ID: LIB31-011-Q1-E1-E1
acgcctgccggtagcggtccgaaattcacgggtcgaccaaacggcgtgtcttcatctggttgcatgaaattgctccttacattcgccattcctaaaagagtagaaagtggagaggggtcagaaatgagaagagagaagctttctagggcttaagcttagtggtcgtgtcctacagtcagcgtgtgctctgataccaactttgtagcgaccagacctcaaatggcctgtgctgctgtgcaccagtgtcatccctggatcagtaatgctgacacgcacagtacaaatggaggatttataacagagtagcaatcacacacttattacatcgatatctccaaagagattaagtatgataaacatggcttaaggccatctaataacgataacagcagaagacttggaagataagtgagtccatcaactccagcggcatcactgagttataagacacgacctaaagcactcactcgt

SEQ ID NO: 9837 - DNA, 414 bp, Triticum aestivum
  Clone ID: LIB31-011-Q1-E1-E2
acgcctgcccgtaccggtccgaaattcacgggtcgacgtctgcgacgacgcccacccccagtgccccaagggctgctcggcctgccgcgtggtgacgcccagccctcacaagacgttccggtgcgccgacatgaagagcaccgtcgatggcacctgcggcgggccatgcaaaaagcactgatccgttcagggcttcagtctcagacgaggggtgccgcctaaaataaagctcagatgagatgagcagtcatggcgcctatgcttctctgtgggtcgtgctatacggccaacaatatgtatactgctatcgtcgtgtcttgtcaatgtgtttcctctctcgagaaaggtggtggtgcttgtacttgtgttcacctatcctccgtgaataaacacatgtgatgattgtgtgtgcct

SEQ ID NO: 9838 - DNA, 342 bp, Triticum aestivum
  unsure at all n locations
  Clone ID: LIB31-011-Q1-E1-F1
ttcacgggtccacgtccgggaagtagtcgtcggagtccgtgatgaagaagccagtagtcgcgcagagcgctcctgtaacacccacgatgcggctatatcccccacgtgtcgaggcacgacttagaggcataaccgcattgtggttgttacaagttggtaatcagagccatccccgacttaggagccccccgcttgatcgaatcgctgacgttgttgagtctagaaaaaaatgctttgagtcttaggattatatatatcggagagtaggattctttttactcctcagtcncttcgtcgctctggtgaggcccctgacgtagaagttttgactctcctctccac

SEQ ID NO: 9839 - DNA, 455 bp, Triticum aestivum
  unsure at all n locations
  Clone ID: LIB31-011-Q1-E1-F3
acgcctgccngtagcggtccgaaattcacgggtcgactttgacgatccgactacgaacgtgcgaggacgtcgcgccttagcaatcgctaaaccaactctgagaggttattgaccacgccggatcacgatcaacctgaccacgagggtctgtttcctgcgagcaaacgaagaacaagcaagaaactaagattgcaatctggatattgtgaatataagatgaaagctttattgatcaaggtggggttctgtgacgcctttgtctggtcgttgaacacaaacgaagtacgcgaagttgcagctatggcgaactttaatctaaacaaaaccccaaagtctaaacggtgccctaagggctgtatatatggaggaagagagggggaatttcgtggcccttggtggangggtccaaaatcaaccctatctattgttttcccacacatacggactctaaaaat

SEQ ID NO: 9840 - DNA, 442 bp, Triticum aestivum
  Clone ID: LIB31-011-Q1-E1-F4
ttcacgggtccacgacattgtcatcatggggcccttatttctacacaatatgttcccctttgagaggttcatgggagtcctaaagaaatatgtccgtaaccgcgctaggccagaaggaagcatctccatgggccatcaaacagaggatgttatcgggttttgtgttgacttcattcctggccttaagaagatatgtctccctaaatcgtggtacgaggggagactgactggaaaaggcactcttggaagtgactcaataatatgcagggacaaatattcttggtctcaagcacactacacagttctatagaactctaccttggcgaccccgtatgtcgatgaacacaagaacagtctgcgctccaaacacccggagcagtgggacgactggattacatgtgaacacatcaggaccttcagcagttggttggaaacacgtctc

SEQ ID NO: 9841 - DNA, 401 bp, Triticum aestivum
  unsure at all n locations
  Clone ID: LIB31-011-Q1-E1-G1
tccgaaattcacgggtcgacggtcgtcgagaggttcgtggactggatggtgtcgtggctgctgatgtacggagaggcgaagctgctgctcgtcatctacctctggcaccccagcacacggggtgcggggcatgtgtacgatggcttcctccatctgttggtggcgttacacgaggccgacatcgaccggggcctgcttgagctgatggctanggcgagggacgtgacgacgtcacaactcaaggcggtggctgccatcggtcaagtgtggctagtcgaggctgcccgctgtgtttcgttgcagttgcaggccgcgagatcaggccgggaaggcgccacgcattgacgagtgaaccaatttttggatcggaccataacaacgtgtctcaatcctctgactct

SEQ ID NO: 9842 - DNA, 440 bp, Triticum aestivum
  unsure at all n locations
  Clone ID: LIB31-011-Q1-E1-G3
ggtccgagattcacgggtcgacttccaccaaagcgatatccatcatctcatcgaaagatcgggaccctcgcctctatcaagtggtatcagatttccaggttgctcggtgagattttacagtttttcgtagtttagatcgagtctgttcttcatacctatagtccacgaaaaagccaaaaaaaattagggttagttcatcccatccgaaccaatctgagccttgcataatcttttctgtatttgctttgttgaatttgcggttgcatcgtcgtgttcagttgctggtcttagcgtctagtcttttagagtttcgagttctgttcacaagttgtcacgccgtcgccgcaccatcatcatcgcncctgccatctaccaacaccgctccgaatccgtatccatatnacaccaccaatccgctgtcatataccaacaacatatat

SEQ ID NO: 9843 - DNA, 458 bp, Triticum aestivum
  Clone ID: LIB31-011-Q1-E1-G4
ttcacgggtcgactcccacagaaaacgatagccaccatctcatcgaaacatcgggacaccttttgcctctatcaagtggtatcagatttccaggttgctcggtgtgattttacagtttttcgtagtttagatcgagtctgttcttcatacctatagtccacgaaaaagccaaaaaaaattagggttagttcatcttatccgaaccaatctgagcatttgcataatattttctgtatttgctttattgaatttgcggttgcatcgtcatgtcaagttgatggtcctagcgtctagtaccttagagtttcgagatctgttcacaagttgtcacgccgccgccgcaccatcgtcatcaccgctgccatataccaccattgtcatcaccgctgccatataccaccatcatcatcaacgctgtcatataccaccatcgtcatcatcgctgccatataccacca

SEQ ID NO: 9844 - DNA, 397 bp, Triticum aestivum
  Clone ID: LIB31-011-Q1-E1-G6
taccagtccagaattcccgggtcgaccaaggagacgccgttcaggtacatggagtggtcgatagcgatcccaatagtggcgtacgatatgtatcacgcggtgcatcaaacatttgaaactgtggcactttcgcagtggtcaagagcggggtacgtgttaatggatccacttctcgtcgtcgtctcgcttaacggtgttacgttaccgcgcaagaagattgtcggtcacccatgactacatcacatctgtgacgcccactatatcagtcatggaaatggacatctctatgagtcgaattatggtatcgtcactgggaacttccaggacagcacacgtataactatcttgcatcagacataccatcctcaagcatgtatatgcatgacaaggcctgcaa

SEQ ID NO: 9845 - DNA, 370 bp, Triticum aestivum
  Clone ID: LIB31-011-Q1-E1-G7
taccagtccaaaattcccgggtccacaaagcgggactatcgcgcgtccgcctcgagagcatcaggaccgcttactgtttgcccagcacatcctagaatttgcgaacggcaacaccattcacatggtcgtagactcaactcatcgaggcggtgaacaaagttggtgatagttgtgacatctcaaactacaccatcgacttgctgcattcaggcgacgggcacgtaaatgactacggcaagccagggcataagtatagcggcagcatgtggatgagattgatctgtacctagtgttgcagcaagctgcagctccagtgtgataagtatagctgcattctgatcaagccgtaccacactgagcagatgcacat

SEQ ID NO: 9846 - DNA, 473 bp, Triticum aestivum
  Clone ID: LIB31-011-Q1-E1-H1
ggtacgcctgcggtagcggtccgaaattcacgggtcgaccgtatatgtcaattctgtattggttctaggcaagtaggttgacatgttcatctgttatcatgagtgtcgtgtttacacttgcagttcagatattacgcttaagctaaaggtctgattgtactgtctagaggtggaatggctaagctctctttatggtcctttttgttgaatatcttgcaaatggcacactaaagtgcaggaaattattaggtgtgtgggtatcaatccagtatgttcttatgtctatggatccgggaaatgttcacgctttattggttttggtcaacaaaattttaggtgtacatgctttcatcttgaatatatgtaattcttaagtaatactacttctcggttaattcattgaagtaatgatacaatcaattggacgtttctctacagttatgcatctagcgggaaaattgttgttttcacat

SEQ ID NO: 9847 - DNA, 483 bp, Triticum aestivum
  unsure at all n locations
  Clone ID: LIB31-011-Q1-E1-H2
acgcctgcccgtagcggtccgaaattcacgggtcgactgcggtctccactccggtggatggtggttcgggcggtggtggatctcgccggggagggctgcaatcgtcaaattgaggctcgggttagaggagtgggtgtactangaggcgactggcacggtctgggaggcgggggtggtctcaccagagggaatcgtgccggagcccgaagcggatcggggcggtcggagtcggggaagaaggcctcctcgaggtttccctagtagctaggcgtggctctggtgagatgtangagtggtgctgggtcgaaggcgagctcgaggcccctttttatagccggtccgaggcggttgccgagaacgggataactccggcgatgattacggtgaggcagtggtcgaacaagggtttaagggtcggggcagctgcggattggatcactagcttcaacccgttgctaaacttgggcagacttgggcgatact

SEQ ID NO: 9848 - DNA, 457 bp, Triticum aestivum
  Clone ID: LIB31-011-Q1-E1-H4
tccgagattcacgggtcgacttgttcaagaggacggtattctttgtgtcgatcgggagcaacgacttcatccactactacctgcgcaatgtgtcaggcgtgcagatgcattacctcccatgggagttcaatcagctccttgttaatgcagtgaggcaggaaatcaagaatctgtacaatatcaacgtccgaaaggtcgtgctgatgggccttcctcctgttggctgtgcccctcacttcctctcagactacggcagccaaaatggggaatgcatcgactacatcaacaacgtcgtgatcgagttcaactatgggctgagatacatgtccagcgagttcatccgccagtacccagactcgatgatcagctactgtgatacatttgaggggtcagtggacatactagagaaccgttgacgctatggctttctgaccaccactgatgcttgctgtgggct

SEQ ID NO: 9849 - DNA, 472 bp, Triticum aestivum
  unsure at all n locations
  Clone ID: LIB31-011-Q1-E1-H6
cctgcagtacaggtcggaattcncgggtcgacaggatttggtcatttgcatggttagtcatgaaatcctacataaaacttgtggatcactgaatatgatatgtttgattccttgcaatagttttgcgatatagagatgataatatgtgggaagtactagtaaaaagttgtagttagtaagaatattggtgtaaaggtttctgattcccgaagcatgcacgtatagtctctagttatgctatgaagttggagcatgatttattattgattgtctccttatgattggcggtcggggacgagcgacggtcttttcctaccaatatatccccctaggggcatgcgtagtagtactttgcttcaaggtctaataaacttttgcaataagtatatgagttctttataactaatgtgagtccatggattatacgcactcctacctttccgcaatttgctagcctctacggtaccgtgca

SEQ ID NO: 9850 - DNA, 424 bp, Triticum aestivum
  unsure at all n locations
  Clone ID: LIB31-011-Q1-E1-H7
tacagtccgaaattcncgggtcgaccacgtcttccagaccaacatgctcgacatgctcaagcagaccggcgggccagaaatggtggtagggtggtatcactctcatcctggttttggttgctggctatcgggtgttgacatcaatactcaacagagtttcgaagctttgaaccccagggcagttgccgtcgtgatcgaccccatccagagtgtcaaggggaaggtggtcatcgatgcatttcgtctcattaaccctcagaccatgatgcttgggcaggagccacgtcagacaacatccaatgttgggcacctgaataagccatctattcaggctcttattcatgggctcaatagacactactactctattgcaatanattaccgncaaaatgagctcgaggagaagatgctgcttaaacttcac

SEQ ID NO: 9851 - DNA, 332 bp, Triticum aestivum
  Clone ID: LIB31-012-Q1-E1-A1
gggtcgacgcctagagctctaaacctacgacatgacatggagcattgcactcggtggagttcaaggtctgagatgacagctgaggtcgatataaacaagtggactttgtaaacatgaaactgctacttttcttgcccattcttgttctgcgtatagcagctaaaaatggggatgggatgcaccttctttggtgcttatcaagaaaactcatcatggttgcacaacaggatggagccaaaggaaaatcaaccgccaggtttgatttgcatcactacttgctgctgaaaagctcatccttgatggcaaatggattctgaggattctggttgttt

SEQ ID NO: 9852 - DNA, 460 bp, Triticum aestivum
  Clone ID: LIB31-012-Q1-E1-A2
caggtccgagactcacgggtcgacaacctccacaattcagacattccaggtgaaccaagcccaaaagcagaggcgccgtacataccgtgctcacggacgcatcaatccttacatgtccaacccctgccacattgagctgatcttgtcagagaaggaagagcctgtgaagaaggaggctgataacgtcgtcgcaccaaggaaagctatctaagccaccggaatggatgcattcgtccaacagtcttagttgtagttcttctcaagtacctttgttggcagtgtttgttgcctccttgatgtttttgttaccaacattgagtaaggatttgttaaggttgatgctatccttgtgattgcgagtggtctttatatgctaaaacagtttcagatatttgagcattagcacaccagaacttatttctctaaaaaagaatgtcgttaaagaagaaaaaagcgggcg

SEQ ID NO: 9853 - DNA, 477 bp, Triticum aestivum
  Clone ID: LIB31-012-Q1-E1-A3
cgcctgccggtaccggtcgcaaattcccgggtacgacatcgagccagatgcgcatgtcaagcaggcgatgaatgagattaatgcagctgcaaggatgagggtggctgcaaacgagaaggcggaggctgagaagattgtccagatcaagcgtgccgagggtgaagcagaggccaagtacctgtctggcctgggtatcgcccgccagcgccaggccattgtggatggcctgagggacagcgtcctgggcttctcagtcaatgtgcctggcaccactgcaaaggacgtgatggacatggtgctgatcacccagtactttgacactatgaaagaggttggcgcgtcctccaagtcctcggcggtgttcatcccccatggccctggcgcggtgcgcgacatcgccacgcagatccgcgacggtcttcttcaaggccagtctgcctctgacaactaagcactttgcttcgccggcatgaactt

SEQ ID NO: 9854 - DNA, 482 bp, Triticum aestivum
  Clone ID: LIB31-012-Q1-E1-A4
cgcctgccggtaccggtccgaaattcgcgggtcgactttgacgatcagactacgaacgtgcaaggacatcgcgccttagcaatcactaaaccaacttcgagaggttattgaccatgccggagcacgatcaacctgaccacgaaggtctatttcctgcaagcaaacgaagaacaagcaagaaactaagatggcaatctggatattgcgaatataagaggaaagctttattaatgaaggtggggttctgtgacgcctttgtctggtcgttgaacacaaacgaagtacacgaagttgcagctatggcgaactttttatctaaacaaatcccaaagtctaaacgacgccctaagggttgtatatatggaggaagaggggggaatttcgtggcccttggggaaggggtccgaaaccaaccctatctcttatttcccacacttacggactctaaaaacaacctatacttatgtatttcgaaattacat

SEQ ID NO: 9855 - DNA, 452 bp, Triticum aestivum
  Clone ID: LIB31-012-Q1-E1-A7
ggtccagaactcgcgggtcgacgtcggggaagtagtcgtcgttggggaagtagtcgtcggagtccggggcgtccgtgatgaaggagtcagtagtcgcgcagagcgctccccaaaaaccttatcacccttctcctgtaccggacggaaagaggtgcgggtccggaggcctactgtcccgacctgtggtgcacgccgcaagccgggatgcgaaagatcgtagcagcagcgcagtgctcaggaaccggtggcgagaggaggaggtagttctggtgcgtctctctgagaggagcgacctcccttttataggcgcaagacaaggaggcgagaggctgcgccgggagcccaaggaaacacgggagaagagtgacctttcatagacccgtagtgcgttgaagaaatttagacatcggttcgttcccacaggcaagcggcggaagacgaacgcgccgtgg

SEQ ID NO: 9856 - DNA, 167 bp, Triticum aestivum
  Clone ID: LIB31-012-Q1-E1-B3
cgcctgccggtaccggtcccaaattcccgggtcgacattgccatttgcagccagccatgtttttcaaatccataggaatcctctcaatccatcggtatcgcacgccgcagccgaacttggctgtctcctgtggggggcatcaacagatccctcacaggtgtctttcc

SEQ ID NO: 9857 - DNA, 471 bp, Triticum aestivum
  Clone ID: LIB31-012-Q1-E1-C3
taccggtccgaaattcccgggacgacggcttgttgtggcggcaatagtggccgttcagtggtcttggaattttgatataacttttattgtgtttgagatgttttgtctttcgggagaactttttatcattttcaaaacaaaacaaaagaacagacttgaaaatttcttgtaaaaaatagccacttcacatgaaacttgcatggccttctggcacatatgtgaccatttcattccagttgagcttatgggctaggggagggaacagagagctcttattggatgcccccgtgcgtaacgctagatagcaacaaatccatattataagtgtcgtgccttgataagagccctgtatggacaatggacatttttgtaatatatgctgaccaatttttaactacacactgaatatttttgtgatatgcaatgaataatatttaaatacacattgaacatttctgtgatatacgctga

SEQ ID NO: 9858 - DNA, 417 bp, Triticum aestivum
  Clone ID: LIB31-012-Q1-E1-D4
cgcctgcccgtaccggtccgagattcacgggacgacctccgtgacgtgactcacatgctgtgtagcaccattcgacgggccgaccacacactgtcaggcacaattcactatgacacgacatggtatctcaaggatccgcctgccagtgagaaacccgcatgtttgcatgcgcgatagcactgtttccgagatccgttggtgcctcatctgggcacgcatgttacgtccagtggcatagataacgtcaactagccgcagtgaacggggaacgcgggaatgtttgtccgcttcataatgccagctacactgaccgtaaacgcgacatcatgactcattcagccagtcacgcagattgatttcccggacaatttcattgtgcagtactaaacgccaactgacttttatgacacaatataa

SEQ ID NO: 9859 - DNA, 449 bp, Triticum aestivum
  Clone ID: LIB31-012-Q1-E1-D5
caggtccagaactcccgggtcgacaggccacgtgaacatcacactgacccaggccggcaccgttggattcctcctgctttaaaaaaacacctataattttattcatgctcgtaacaattacaggtacattgatttgcatctaaaatcgaagaagacataaagtaattcctctgactaagaattataacgaagacttggaaacagcttctgctagaaaaatatatttcaaagagttccgtaaataggctgcaattgactggagcaacgatgttgtcactcattcatctgctatagtaccagccaagttttttttacaaccggtttgtaacattgaggtctgctacattacgtgtggttgttgatctggtgctttggtcttttggggacttagcacgatgattctccgattgtctaatagaataagttgtccccggctccggcaaaggaag

SEQ ID NO: 9860 - DNA, 467 bp, Triticum aestivum
  unsure at all n locations
  Clone ID: LIB31-012-Q1-E1-E4
cgcctgcccgtaccggtgcgaaattcncgggacgacgagtgactagccacctaggtggtgatcctggccatggagggccctatgtagatagacaggcttcgagaagccttctttctttctagtgtctgtactcagactagttgcttccgcttgtgcttgtatgattgtatggcttgagtgtcgggtcttgtgacccctatctgtatgaacatgttatgtatggctctctggagcctttaaataaagtacttgagttgtagagttttgttgtgattccatgttgtatgtactcacatcgggcatagttgtttatccttggcagcctttcttatggggaaatgtagtctagtgttcctcgagccatagtagtccgctacaacccggttcaccggagtcctgcttgcctagcactactgctaaggacacttgactggccggcatgtgtttcacgtcactcctatgtctgt

SEQ ID NO: 9861 - DNA, 485 bp, Triticum aestivum
  Clone ID: LIB31-012-Q1-E1-F1
ggtacgcctgccggtaccggtccgaaattcccgggtcgacacatctttaaaatgacatgtcaaacttagtttttgaggctatgttgcatttgtagttcttgctctgttaaatttgaggctacgttgcatttatagttcttgctttgttaaatctgagattgatgaaaatggtatatagaatgcaaaaaaaattgtagccacataatgatgttgtatggtacccccagcaagtaatatgcttgaatcaatgtgacttttcctgattataattatcttatagtatcgtgatgttggcaggtatatgcgagtccggcagggcggtggcgtacctttgcaagcacgaatggagcgaagacttgctgtgggctgagctgctgtctggtcaaggaagaaagttgatgtctttactggcgaaacaaattgctgcggcagcaatgcttgtgagcttatgatgtgcctctagtttagtttgtcggtttctgtga

SEQ ID NO: 9862 - DNA, 479 bp, Triticum aestivum
  Clone ID: LIB31-012-Q1-E1-F2
acgcctgccggtaccggtcgcaaattcccgggtcgacaaactccttgctccccatcgacagaacaacaaggtccaaccatacctcattgtatatatttttcaacacatgtatgtttttttaattcacaattgacatttttcttatatttgtgcaacatctttttgatagatgttgaacatttttgaaacactatttcctcctccaagattcttgctttccttctacaggctcacgtatgaaaaatgtgtgccttatagagggctaggccagaaatacatagcatagataacaagggtttcgccaaagtagacgtacaagcgaaacattccacttatcgaagaaggtaggtatttcaagttcaagaagtaggcatcgatcccaaagaatgtagtgaaaatctagactaggaggaatgcatcaaagccaaggtcaagcaaaaggttgttggatcgttacgttggtcggaagttatttcctt

SEQ ID NO: 9863 - DNA, 481 bp, Triticum aestivum
  Clone ID: LIB31-012-Q1-E1-F3
cgcctgccggctaccggtgcagaattcccgggacgacctcgtcggtttccttgttgggtctcacactcactctcacccggctgggtccgtaagtgaggtcgtggcccacgtgctagtgtcaccaccgttggggctgatcgatccgtccaaatccaaaacgctagcggacagcgctaccgtccaccgccgcagatcaaatctgtgctaggaaaatgcctgccccatctatgtgggtcggtcgccgggcgtggctgacagccccaccaataatgcatcccgaacttgattagactgcacaacgagtgagcagatactctccaaattcttgaatttcagggagctggtggattgccaaacaacccctgagattcaagctatttaatcaagctctcctcgttaaacaagtctggcggatcatcacggtcccgaactcgctatgtgctagagctctaaaggcacggcatttcccgggaaaagatat

SEQ ID NO: 9864 - DNA, 470 bp, Triticum aestivum
  unsure at all n locations
  Clone ID: LIB31-012-Q1-E1-F4
acgcctgccggtaccggtccgaaattcncgggacgaccatgcagaggtctgttctcccgaaatatccaccctttactctttcgtaagtacgatggagttcccgaagaaaggatgctgacttcatcatgatgacctgaaacagagaaatgaagacatcaacgtaatggatcgacctctttaagaagggcaaccaagactgagaagacctgttagaatttcgtaacaaaatcccttccccttactcccctcctaaatctcgggacgagatttcttgtagtggaggagaattgtgacgccctaataattaagctacagtaaacctttgttaatgatgccacgtcacctcggttacagttgctaatctcacgttagttcaaagtttgactcatattcaaatttgaattatagccaaacagtaaaggttttcaaatattaaaactaaaatgttcgggttgtgccaaataatgcat

SEQ ID NO: 9865 - DNA, 456 bp, Triticum aestivum
  Clone ID: LIB31-012-Q1-E1-G2
acgcctgcaggtaccggtcgcaaattcccgggacgacatgaagatggaacatgatgcacagttgctcttggccaggaccagggcgctgactgggcaaaggagacgaggaactcgtcaagaattaattggtcatcgcttagtctccatgtcaacagcatggcgcttcctcgaaggaaacgtcacccgatgaatgatctgctttggtgacttttggtcgaagacgtgagatagaattatagaaatagaatggatgttttcacaggcaaaggcatggcactcagtcgatacggtatggatgcaacattttctttttgagaatttagtagagtagattattattttcttgattatacaaaatattaggttgttttgtctcggtggacgctgatgtggaaaaactgaattactacactgcccaacgagaaggaagtggtggaatataccggcgaacgggcg

SEQ ID NO: 9866 - DNA, 475 bp, Triticum aestivum
  unsure at all n locations
  Clone ID: LIB31-012-Q1-E1-G3
ggtacgcctgccggtaccggtccgaaattcccgggtcgacatacttcgcgaatggcagcagtattcacatctagcagcatggcagcagaccagttttttttcttttcctgcatgtgtttttcttttcttttttattttctttagtatggatctatctctctgatcaagcaagaagagatcggcagctccagcgacatgacgagccgtttccgggtttttatgaagggaactatttggggtcgcgcggaagcaaaactagctagggtttattagtgctgctctagttccgcttgctattcctttcgcttgttcgtttgtttctttaaggattttattatcaaggttgtaaggctggggatgtgcagctagcttcagattcaagcctgccgtctcgcctgcttgtacattgtaaaacagaaccgctgctctccagtgactgaatgattataagcagctactgtantggtatttgggg

SEQ ID NO: 9867 - DNA, 461 bp, Triticum aestivum
  Clone ID: LIB31-012-Q1-E1-G4
actcgtgggacgacgtcatacactatagtgagtcgtattaagaagattcgttaggatttcgtaaccaaatcccttcccccttactcccgctcctaaatctcgggacgagatttcttgtagtggaggagaattgtgacgcccgggtaattaagctacattgaccctctgctaatgacgccacgtcacctcgtttatagttgctaatctcgagttagttcgaaaccaattcaaattcaaattaagaaaaataggcaaacaataaaagctttcaaatattaaaactaaaatgttcggagtgaaccaaatattgcatagataattatgggggaaaaaccacacatgcataaaatgtttaaataatatgagatgggtaaaacagcagcaaaacaattattttaaatgtttttaaatactaaacaaatgttaatctagtttatataatcaccaaactttttagagta

SEQ ID NO: 9868 - DNA, 416 bp, Triticum aestivum
  Clone ID: LIB31-012-Q1-E1-G6
cgcctgccagtaccggtccagcattcccgggtcgacatgtgtcacggaatgcactctctcaatgaaatcagtggctctgttgtcgctgggttccattatccatccatagcaggtgccttggctgacgacaacatgcttggcatctgctttgatgtctgtgatgtcgttctgtaaattgattctaatcagatgggtggcggttaggtcatcccaacagtcatcacggacatttatccttctcagctcactgctaagcccacgttgctgcatcctgtatacctgcctgatatacaagcaccagataatgcacttggcggtacctaaggtgttcttaatcataagataagagcacatgtttgacgacatgcatatagctgttaccccgctgtacaacatcgacgcttacctcccggtca

SEQ ID NO: 9869 - DNA, 473 bp, Triticum aestivum
  Clone ID: LIB31-012-Q1-E1-H2
cgcctgccggtaccggtccgaaattcacgggacgactcttaggcgatgctcagccagtcacctgggaacacctggcatgccagcgggcttccatgcaaaaatgtcccagttctcacggaggaactggatgagcgcttcttcctattttgggtcgagtgtcacagccccagatcagcccttgtttgtttttgctttagcatccatgcaacatgtttaaattttatgaaatttgaaatggggattgctcaaaccctagcattaaaggaattcactaggttcacctaaaatactttcaagtaagtccaaatggctttcaaaaatgttcatgatttttgacaaaggtgaaaaacctctaccaaaaatgatgccaatatttttgggccattatggatttttgaataatccatattgtatttgtattggggcatttaaatactattaatatttttaaatgctccaacagttctgaaaat

SEQ ID NO: 9870 - DNA, 450 bp, Triticum aestivum
  Clone ID: LIB31-012-Q1-E1-H4
gggacgacgaccactggtcaactgatccataagcttggaggcattgacaagcgtgtgatcgagaggttcgagaaggaagccgctgaaatgaacaagaggtctttcaagtacgcctgggtgcttgacaagctcaaggccgagcgtgagaggggtatcaccatcgatattgccctctggaagttcgagaccaccaagtactactgcaccgtcattgatgcccctggtcaccgtgacttcatcaagaacatgatcaccggtacctcccaggctgactgtgctgttctcatcatcgactccaccactggtggttttgaggctggtatctccaaggatggccagacacgtgagcacgctctccttgctttcactcttggagtgaagcagatgatctgctgctgcaacaagatggacgccgccactcccaagtactcaaaggcgcgttacgaagaa

SEQ ID NO: 9871 - DNA, 462 bp, Triticum aestivum
  Clone ID: LIB31-012-Q1-E1-H8
cgcctgccagtaccggtccagcattcccgggtcgacacaggaggttttagtattccctgcatgattaccataacagatatatttcaagcaatgaacataatcaccactcaccatacctcatcatgccataccggacacaaccatctcgacggaggactagagacaagcccgtgtctacccaagacagaggctttcccggattccttccggtatgcatgaaaggcatacgatggtgattactatcccaacgtatcaaattccaatagcacggaatcatcaatatgcacttatgagtatgttcatatcatcgcataaaataatggaaactccgagacgatgggtgttgtaaccgtatcaaacaacacacgacaatattatgccagggttcagaatgcttgccttcaagttgtggagaggcaaggtgcattccagaacttttgaaagttttctcctctccccaaa

SEQ ID NO: 9872 - DNA, 379 bp, Triticum aestivum
  Clone ID: LIB31-013-Q1-E1-A7
gtcgacagggctgctcaagcggcagagcagtccagcagccgcagcggacgactgaacgtgtcgcaccccaccgcaccatacaactataataattcttccacttcatgagccattggactactgggaaatatgtttagataataagcaagcctttagatgagaaggcagatcataatagctgagcaatagtatctttttttttcctttcaaactagcaccttttgtaaccccacaacccatagcattgagcaagcacaaccaatcattgtttgctctatttgattattactaacccaaatactagctatagtaatgatggctaatggtgcatctccagatttcttcaaaatagctctcgctacttacgccatttttcatg

SEQ ID NO: 9873 - DNA, 467 bp, Triticum aestivum
  unsure at all n locations
  Clone ID: LIB31-013-Q1-E1-A8
taccgatccagaattcgcgggtcgacgccaacttatgacaccttagtggccgtaaacaaccacatgtgtttatcaattttttagttgtgaccaaacttttcgtcctcacttggattgttgccaaccttttagcatgtcggtggctcctaccaattatagtttatttgtgtagggaaaattggccaactcttggagtacataaaacattgatccaaattttggctacccaaaattttggtggtgcaaccttgggctcaaatcaaacgcaccttgaatttctcacgcaacccaggtgggacctttgggaccgcttggatttgatcaccggatgcaagacaagatgaataccaccggaatctaatatagagtggctgagtgggttttttatgtagactacangcattgagtgctcacgctctatgatttcagtggatataacaacanaaattgaagtagacgatgcaact

SEQ ID NO: 9874 - DNA, 436 bp, Triticum aestivum
  Clone ID: LIB31-013-Q1-E1-B7
aattcgcgggtcgactttctctgtaaatatcactctccgcagatacttatacacctgtgtacacgcattgacgcattattcgcttaacccataactcttcagcaggctatcgtcactatggggcacgacatgcacttacactcgccccctttgtggcgattgttgactctatacgttaagtttgcaccggggattaacatagcacgtgtagataatgatattgacgaatttgattgcaagatatagaacatctcccccggaagatgtgcatactgacgaatttgcttttaattcatggcatacttgaagacttcaatcatggtcattaccttctatatcttgtgattcatacacgcatttaacatatgatatgacgaatttgaaatgcatgattgacatatggtgactgatgtaattcagcatacgtgcataacca

SEQ ID NO: 9875 - DNA, 384 bp, Triticum aestivum
  Clone ID: LIB31-013-Q1-E1-C10
tacggtccgtacattcacggggtcacatcggcaggaacatcatccatggaaacgactcacttgacagtgccaggatcgagatcgccctgtggttccctgaaggcattgccgagtggatgagcggacagcacaactggatctattatgccgagcatgtgtcatgagtgcttgagtgcaggtttcattaagcatctaccaacctagcctttggttgtttacagttttgagatatgtatcttgggaaccatgtttgtgtgcactgaagttatctccttgtgcatgggcacccaagcggtagctgctgctctatatttgatacatggtactgctttgccctacactgcacggaaaacattgcatgcagcggccgctctaaaggatcca

SEQ ID NO: 9876 - DNA, 446 bp, Triticum aestivum
  Clone ID: LIB31-013-Q1-E1-D12
taccggtccgacgattcacgggtgcacacaccacaaccaagcccgcagtaggagagattcacgcaggggcctggagccatcgcaacagaaacctagaaaaggttaaaaataaagagaggctagagaaaggagaggagttgcggctagaggagaaatgaactgcaaaggaagggtagaagttggcctaaatttataggagggaatgccaaaaggtcaaaactgaaaattaaagaggagttaatgaaaattacgttaccaagaatgaaggacaatcaataaaagtttatgttaccaaaacaaaaaagtcttaccaggaagttctacaacgactttgactgcacaaattcatgacgaatttgtacacctgaagcacaagaccatgacgaatgcagtgcatagacgcaacaaagtagtgcatacccctaccaatgcagtgcacaaaaatg

SEQ ID NO: 9877 - DNA, 442 bp, Triticum aestivum
  Clone ID: LIB31-013-Q1-E1-D9
taccggtccgtagattcacgggtgcacatttgtgaagacgatctcaaaccctgtggcaggaggcaagaacgcctggtttgcgaagttttaggaggcttgcaggaaggatgtcgagcgggcatttggtgtgctccaatctcgatttgctgttgttcggtaccccgctcagacctggtccaaagatcaaatgtgggagattatgacttgctgtgtcgtcttgcacaacatgatcatcgagagcgagcaaaaagacccagtgtttgacactgaaccatactacaggcagggtcctctagccgaagttgatcaccagctaccggcaacttggactgcctatctcagtatgcgtcaggagatccgagacccacaggtgcatcatcaactgcagaaagatctgattgagcacctatggaggctcaagggggacgccgtgtgaatgaat

SEQ ID NO: 9878 - DNA, 438 bp, Triticum aestivum
  Clone ID: LIB31-013-Q1-E1-F8
cgacggcggcaaggaacatctccggtgctccgccccgtcccaatcgatcttccaggcaggctcagcctccaagcgcccctcgacgccgcactgcacctcatcgaccaggaccctggtcgcgggcgtcacggtctcctcctccctggtggccgcggacgccaactcgtgcatctgcccaggaatccatgaggcaccacctggccgtctctgtggcggattacgacagatttgcgaccaagctcaagacccccggcacagacttgttcgccaagacgcaacccgatggccgcgcgcgccaagtgttcttcctcgaccgggacgcatttgtaatggagtggtgttccatgatgtaagggcgtgctctgatagaaacatgacatgacagtagaagtagatttgacaactggatgcccaaggcttaaataggaactgagatga

SEQ ID NO: 9879 - DNA, 375 bp, Triticum aestivum
  Clone ID: LIB31-013-Q1-E1-H1
ccactccctaaagtgactcgtattataagttcataagaacggagtaacgcattaagcaagataacatgatgtagagggataaactcaagcaacatgatataaaccccatatttttatcctcgatggcaacaatacaatacgtgccttgctgcccctgctgtcactgggaaaggacaccgcaagattgaacccaaagctaagcacttatcccattgcaagaaagatcaatctagtaggccaaactgaaccaataattcgaagagacttgcaaagatatcaaatcatgcatataagaattcagagaagaacagatattattcatagataaactttatcataaacccacaattcatccgatttcgacaaacacaccac

SEQ ID NO: 9880 - DNA, 416 bp, Triticum aestivum
  Clone ID: LIB31-013-Q1-E1-H10
taccggtccgagattcacgggtccacggtttcttgattagcgaggcgatgcgcgacgagcgcggcctggaggtgcacattcttcgtcgtgacctccggcacctgcagggccactagggcttgaaagagttcgtcaccatggaggccgatcagggtggcaggcaatgaggagcctgggcgcgcgggctggagcagtatggcaaggtcatctgcgcgcttcttgacgtcggtgaacttgcggatggagtggaccatcatgtcgtccatgcgagaggcgaagccggcgttggcgagggctacgacgccggcggtcgccagcaccttttggaaacgctgcatggtgtggggccgcaggccggcgtcttggattatctggcacagccgactgccgctcacgtccatcgcccccaaaggtgc

SEQ ID NO: 9881 - DNA, 358 bp, Triticum aestivum
  Clone ID: LIB31-014-Q1-E1-A10
ctcgttgtacctcgcaacaccctatagtgagtcgtattactgatccctctgactaactgcatttttgagcaacattttcacctctctgtagcgagagacggcccactccacttacgccggtggcacgggcagtttgccgttctgtgtactgtctctggatcaattctaaattccaccgaagacatacactcgttctgccgagtctgacccctgccatcacaactcatcgtacatccgacttgtgtaagcaatataagtatcgctgcttaacttcaatgcccgaagcaaccgttcatatctacaccgtgtagaaatttcacgggtgcaatttgtgcctcttcgagttactgtctctgtt

SEQ ID NO: 9882 - DNA, 296 bp, Triticum aestivum
  Clone ID: LIB31-014-Q1-E1-D11
tatcggacctgaattcgcgggtcgaccctcggcaggatagttggaaccaaatgccacgttcataccctaatatctttaacactaatacgagcattgccgcacataaagtattaacagtaccaataccagtcagagttaaaatcattttacacctgaccatattgtgcgtctggtagaccatcttgtagaagaacagctcccactccttctcttgcagcacgtccctcaattagtactggtacaacaaccacttggacgcctgctgcatcaagttcttgttggtgatcagtaccata

SEQ ID NO: 9883 - DNA, 465 bp, Triticum aestivum
  Clone ID: LIB31-014-Q1-E1-E10
taccggtaccgtaaattcccgggtcgaccggcaccactcggatgtccgacagctgtgcagatttcctcgtcattcctcagtagtcatcccatctctcggacgtccaggattcttcaatcgtccattacctgactcatctggtgcactcatcagctcccggacgtccagcatctgtcggtcatcaggtaaaatccacgacccatataaaacagggaaggggattgaccgggctgttaccctaaactttcccctcgtacccatccctttcctctgtccgctgccgcaccgctgtcgtggagcctcgctgtcggtggagtctggcgctaccggacagatgctctgccgatcctccttcaccttgatctggctcggtgtggctaaccaaaccacgtcgacattcaagcatgccgctcacaaaagtatcgacggctcatcggctcacgcgtctcattgcggtggctcgga

SEQ ID NO: 9884 - DNA, 448 bp, Triticum aestivum
  unsure at all n locations
  Clone ID: LIB31-014-Q1-E1-E11
gtaccggtccgaaattcccgggtcgactatctccatgaagtccgtgatttcttcctcatggccaaggaagtctgcgcgtgccttctcctccagttccagttcgcggaacaaaagcttccggtgtgtcttcgagttacggcgagtctgaatctctcgtttcctgagaagacactccaagtcctggatgtacgagagagtggaatcgtcctcaatggtacggatgatatctccattccttgccctgcgagaaaccatggcgaggtctgagtgatcgagctcggccctgtactcctctcggagatgtccaagtgctcgatagatcgccacgtcccttccgatgatccagttgaactcggtgaactcaaagttgataggctccgtgtgtcctccaaaggttctccctgggatatgcacttcaatcctgtancgggtgtccgtcggaagtgca

SEQ ID NO: 9885 - DNA, 440 bp, Triticum aestivum
  Clone ID: LIB31-014-Q1-E1-E12
gtaccggaccgaaattcccgggtcgacttctgctattctccctcgtcatgtttgagatagcgccagccagaacagggacatgactggattattttgcgtcagcaggtcctaaactcttcattctgaaacagtgcaagatcaactgcatcttatctgatagtagcaggttacggaaatacatacatggaattgacctgaaactttccaggacagtgtacggtgggtccttgggtgtctctaccatgttcctagtcaatagttgcaaagatcgtgtggaagctagagaagatctcgaagctcgtcgatcagcccccacacaggaggcagcggggctttttcccttctcccataggacgaaaagcggttcttcttctctgaaaaagagagacaaacctaggccctgaaggatcgcatcccgatctagccttgtcgcctccgcg

SEQ ID NO: 9886 - DNA, 435 bp, Triticum aestivum
  Clone ID: LIB31-014-Q1-E1-F11
gtaccggtacgtacattcccgggtccactggaaaactagcaaatcgcattttgtcaggtgaatttgatataggaaaagtttcttaaaagcatgcaaaaatatcatagaatggtgatctttttttttaaaaccctccgttctagtcattttcaatcatggcagtacaacagacaccataaatacgtattacatccagatccgtagaccatctagcgacgattacaagcactgaagcgagccgaaggcgcgccgtcgtcatcgcccctccatcgccggagtcgggcacaatttgtagtcctggacagttgggaagtcgctgtgttacgacaccatagagacagcgcattacaagagcatctgccgccgatgagcaatggcaggccgatctacctcgaagacacattcagctcgacgagacacgaccatcagagctac

SEQ ID NO: 9887 - DNA, 196 bp, Triticum aestivum
  Clone ID: LIB31-014-Q1-E1-F12
ccacgcgtccgaaagaagttagtcgcctttgctgtcactcagagatcggtatcattaccatctattcgtgattccatagatacgccttcgcagactgtactggtgtgattccatcgtgcacatggcagaccattttctaggctgcaatttcagcaacctcagcagaattgaatcaaatctattctttataatggct

SEQ ID NO: 9888 - DNA, 379 bp, Triticum aestivum
  unsure at all n locations
  Clone ID: LIB31-014-Q1-E1-H11
acaacaccctatagtgagtcgtattaatcancagatgagaaatctttgcctcaagcatctgacaccacactctcaggttggatactgcgatatcaaagttcttcatcattatgactcaattcgggtcctgtatactatatttcattccaatccagattcttcctataaggttcgtacattctacccatactgacctctgccgtagccactcactcatatccgtttgcttcactcactctacgtctctctcgataccgtcaattcccagatcaaagggtcctacttacagctggttgaaaattcccgggctcaatttgtcactcttccagtttctctccctctgcagtctgcactgcctgcaactgactttattgctcac

SEQ ID NO: 9889 - DNA, 471 bp, Triticum aestivum
  Clone ID: LIB31-015-Q1-E1-A1
cgcctgcagtaccgcgtccagaattccagggtcgacttccaccaaagagaaatccaccatctcatcgaaagacgggacaccttagcctctatcaagtggtatcagatttccaggttgctcggtgagattttacagtttttcgtagtttagatcgagtctgttcttcatacctacagtccacgaaaaagccacaaaacaaaattagggttagttcatcatatccgaaccaatctgagcctttgcataatctttctagggttttgctttgttgaatttgcggttgcatcgtcgtgtgtagttgctggtcttagagtctagtcttttagagtttcgagttctggtcataagttgtcacgccgccgccgcaccatcatcatcgcccctgccatctaccaccaccgcttatccgccaccgctccgaatccgtatccatataccaccaccgattcatataccaccaccgattcatat

SEQ ID NO: 9890 - DNA, 446 bp, Triticum aestivum
  Clone ID: LIB31-015-Q1-E1-A6
cggtccagaattcccgggtcgacatggatcgatgagcaggacgcgatccctgacgctgatgggtgacccagatggtgagagagaggccgagtggagaagagatgtcgggaaataatacatgaatagatacctccgcccaccgtcatcataggtcctcctcctccttcgctgttgtagttcatgatcaccgtgtccgccatatgaggtctgttacctcgttgccttaatggtctccactgaaggggacatagatgtgtagcaaattgataaggtggaaggagcagaggaattttccatggaaagacaacgaaggagcggagtgtagcggcggcggtgtgtaacaggggaaacaaaggaagcagtgatgtgggagaacttcacgcttccattttggttaggtcacgtaataaaggactaatgggcctaagtgggctgctatgtttttt

SEQ ID NO: 9891 - DNA, 426 bp, Triticum aestivum
  Clone ID: LIB31-015-Q1-E1-A7
gtctagaattcccgggtcgactgcattctattattcctttctcgtttaattaaagtagctgatctgatgcgcggtattattattcttggcgtcttaagattatgaggttgttagccataagtatcattcgtccttttgttggcctattgcctactctgtcgtgtaccagcagtattattttggagcccagacttgatatttcagacttggttgggtgaattggtcgtgtgtgtgctggtgcattttccattattgtttatttaatctttgtaccgctcagcaacttgaggcattcctatttgtatcagatctgtcagtcagggtcgttgtatgactggaacgtgttaatggaacttactcttgttaaaaaaaaaaagtgagagaaaaaaaaaagcggtcgctctagaggattcaagcttacgtacg

SEQ ID NO: 9892 - DNA, 405 bp, Triticum aestivum
  Clone ID: LIB31-015-Q1-E1-B3
tccacgtgacgttgacaaacgtgccaccctgccatcaaatgactacgtgcaatggccacctcacggtgcacctgtacgtagtgtactccgcctcagatgttcagctgctctctgggtacaccacaggcggccatacccggcgatggtactcgggaggatagcaccatccaatcccgccgaggtgtgggagaggtgctgcgccggcatcaaagttaagcctattaataaagaaaagatatttatatttctcgtatttggatgtgcctctatcatgtggcgcctgctaccattttttaaacttgtgggcgcctgctaccaacgggcgatgctatgtatcgctctaagcgagcaagatacaaacgctgtcactacaaaaaaaagcggccgctctagaggatccaagct

SEQ ID NO: 9893 - DNA, 422 bp, Triticum aestivum
  Clone ID: LIB31-015-Q1-E1-B5
attcccgggtcgacatgtgtcagggagtgcagtatctgaatgaaatcaaggactctgttgtggctgggttccagtgggcatcgaaagaaggtgctttggctgaggagaacatgcgtggcatctgctttgaggtcggtgatgttgttctgcacactgatgctattcacaggggtggtggccaggtcatcccaacagccaggagggtcatttatgcttctcagctcactgctaagccaaggctgctggagcctgtgtacctggttgagatccaggccccggagaatgcacttggcggtatctatggtgttctgaatcagaagagagggcacgtgtttgaggagatgcagaggcctggtaccccgctgtacaacatcaaggcttacctcccggtcatcgagtcgttcgggttctcaagtaccctc

SEQ ID NO: 9894 - DNA, 353 bp, Triticum aestivum
  Clone ID: LIB31-015-Q1-E1-B6
gtacgcccgcgcacaccaccatcccagctggaccacgagctgtcccgagctaggcctccgcttggaaaagccgcccagctcttgggccgccgactggggggaccccagcgcccgggaagccgccttgtacgcgccgctgcggaggagttctggtgctgcacgcctgaacacgccgccacacagattggatctgactcctgcgcgtccatcgattcggcctagaagaagttcgccaaaaacacgtcacatgtatcggctgcctctcgatccataatccaactccaagtcgcttctccctcaagaagaaaaggagagaaagacaagaaagcggccgctctagaggatccaagctt

SEQ ID NO: 9895 - DNA, 453 bp, Triticum aestivum
  Clone ID: LIB31-015-Q1-E1-B8
gtaacggtccagaattcccgggtcgacattcctcctgcaaaggttattgacattcctcattcaaaggcgttgcaaaaggttgatcctctggtgccatccaaggtgatccgtagagatgctcctccacagagtttgccggtgttgcagaaggaaacaataaaagttgcttcttcccaccagccagacaggcagccgcagcctgttctgcacaaaccaaaggtgcctgtagtctctcccctcatcaaacagcagcagtcaagcaccttgccgaaagaagagccttgttcctctggcaggaacactgaaaaaggctcagtaccagaggttaagcagtcaaagtctgatcgtaagaagagccgcaaggctgagaaggaagagaataaagagaggaagttccgagatctatttgttacctggaatccaccttccttggagattgaagagacctggaat

SEQ ID NO: 9896 - DNA, 439 bp, Triticum aestivum
  Clone ID: LIB31-015-Q1-E1-C5
ggtccagaattcccgggtcgacccctatctacatacgtgccaagatcttgggcagcgctggggaccggcaagtcgcgagttcttacctcgaaggcgtcatcctggcaaaccaagataaggataacttcctcgtgccttactttcccgagtaagtcctcccctcaaccggcccgtaacatatgaattcttacatttcgatcgtttttcttttaacattccgtgttttctgcagtgacacacgttgcacgctcatcctcctaagccccaaatattccatggccacgtatttccacccggaccgtcagtcgaacgtagactacacaaatgtcaagaaggttcttgatgatgttctccccggctacgccaaatctggaggcaccttcaccaggcctattcgtaagtacggcaagcacgtgttctcccacaatacgatgttctg

SEQ ID NO: 9897 - DNA, 449 bp, Triticum aestivum
  Clone ID: LIB31-015-Q1-E1-C6
acggtcctacattcccgggtcgaccctgatctcgtatggtggcgttcgcgtgggctagtttcggtgcggagggagtcggcccagccggaggtggtacgtcgccgtgtcagggaggaggacgagcacgtccatcgatacatggttgcgttagagggtggcaggttctccaatacccggcagtttcttcagggatctcacttcaactatgatcctgtgagggttccttctctttgggtgtccaccgccgcgccgcaggaaccgcgagtgtcctagattcttctgtagtattcgatctttattagctacctagccagtgatgtattcgatattatatctattattcgagatgatgtattcgagattatatctattattcgagacgatgtattcgagattatatctattattcgagacgatgtttttgagattatatctattattcgagacga

SEQ ID NO: 9898 - DNA, 448 bp, Triticum aestivum
  Clone ID: LIB31-015-Q1-E1-C8
ggtcctaaattcccgggtcgaccttggaactcctcgacatccacataatcatcctccaccccgagcccgaccccaaatccgtcgagccccgtgaagtgccaccccaatcggggttcctcttcttgggccacaatgttgtctggatcaccctcccaggcaccatgggcgtcttaaggtccgcgaggatcactctgccgcacatggccgctagtacctcatcatagtcgttgtggggtaggaacctcgattgaattggtaaatgggcagagtttttaatgaagcggtggagcgggtctgtaggtttgtaggttgagacaagggcagtcccctatatacacggtggtcgtgtgacggcgcccccacccaaggttccatgcatcagtgaggggtcgtgcggcgcagaaggaacgaggtaggttccggaagcaagtgcttccattcatgggga

SEQ ID NO: 9899 - DNA, 451 bp, Triticum aestivum
  unsure at all n locations
  Clone ID: LIB31-015-Q1-E1-D5
ggtcctaaattcccgggtcgacagcgagcgcttagagcacgaacttgacgccggagcaaggaggccatggcatcgacgacgtgagcggaaatattggttctgttgtgctgtctgttggtcttccgaacttggagaggtgatacagccggaactctcttcagagaagattttgaagctaactggatgatagggtcagagatgatacccttgaaggattcagcaagcatgacccagctgccgtcgcgttggccagctaagatggtgttgactctgatgtggacaacgggtcacgcgtgatgtatgtggccggagaggttgattccggtggagtagagggagttgagcaaagtactgtgtttgctctgctcncgttgtgcaagatgggcacaccatcttcaacagtttgttgtggtgtgcgtgcggtgtgcttgaggttccagacaaaaagaaa

SEQ ID NO: 9900 - DNA, 450 bp, Triticum aestivum
  Clone ID: LIB31-015-Q1-E1-D6
ggtccagaattcccgggtcgacctcaggtatatattcgtaatggtaggcctgcaccaccacctcaggtacgagatgatgtccatattcctaaactgaaattgaatatgatgaggacatgactaccttggatatgaccaaaaatattgcatatatgcatatttgtcaggtgatttctagtgcaaactattcaataatgtatttatgttatccagaacaaaaatacttcacacacttttgtgttttgtctaattgcaggtgtatgggacatttgtacaatccacatatgaagataaggaagaaagagatgtttatttgctgtccaaaaagttctctcacgtcacttttggcccaagagaagatagagtccaagtctctcacgttctggattcatattcggactgcacagacatacctgactcaaaacgcacacaagtttttcatacggactc

SEQ ID NO: 9901 - DNA, 450 bp, Triticum aestivum
  Clone ID: LIB31-015-Q1-E1-D8
ggtccagaattcccgggtcgacgagattgtcatactggggcccgtatttctacacaatatgttcccctttgagaggttcatgggagtcctaaaaaaatatgtccgtaaccacgctaggccagaaggaagcatctccatgggccatcaaacagaggatgtcattgggttttgtgttgacttcattcctggccttaagaagataggtctccctaaatcgcagtatgaggggagactgactggaaaaggcacgctgggaggggcctcaataatatgcagggacggatattcttggtctcaagcacactacacagttctatagaactctaccttggtgaccccgtatgtcgatgaacacaagaacagtttgcgctccaaacacccggagcagtgcgacgactagattacatgtgaacacatcaggactttcaacagttggttggaaacacgtct

SEQ ID NO: 9902 - DNA, 442 bp, Triticum aestivum
  Clone ID: LIB31-015-Q1-E1-E4
attccagggtcgacgctccagaggcacgtactgggccaatgtggggatatatctgcatgggttcccagctgcctgcaaaacctcgcgtcacttgtttcgctggagatgtctgagtgcccgggcataacatccattccaggtgacatttggaggacgaaccttgcatctctagaggagttatatatcaccgattgtccagacctggtctcaattgggggattggaggccgttgcgcagctaggcacgctgcacatctctggctgcccaaagatgatagagatgtagcagcctgtgaagagaggcggagactagctaagatcccatcacttttcaagtctatggatttttgttgttgttgcactgagatctctgtatctgtgtggatcacttgccaaactactccagctctctggccagctgagctcatgcctattcctaattc

SEQ ID NO: 9903 - DNA, 427 bp, Triticum aestivum
  Clone ID: LIB31-015-Q1-E1-E6
ttcccgggtcgacaaacatctagcatattgctcggcataaagtcatagttgtaactatatggggcaacgtgaggacaaagatgccatgtcatagtcaagtcagttctgttggtgcgaggcatgcttatttcttagtcgagactcgttgctgaagttggagctgattggtccttggcgtgtttggccgattgtttggtattagtcggcagggtttttgtgcgttggacgtgcatggtaaagtcagagtcgcttgctcgtgagaagtggtgacgatggcactttgtagacaacctcaatggtgttacttgtttcatcaatgtctgtggggtcttatggataggtaggtcaactgcagtgcattatcgtgcgggtgtgttggaatagtcttcgcatgtattccatatattaaaatgcaactctgttctag

SEQ ID NO: 9904 - DNA, 433 bp, Triticum aestivum
  Clone ID: LIB31-015-Q1-E1-E7
ccgggtcgactgcaccagataagtgtattccgtgccctcttttttttcttaggtcatcgtgtgtgcctagtccccgtgccagatttgaataacgttgactaagggagcttgatttgtacaggttcaagcctccactccgacgaccaaatcacccggatcccgcgtcatcttccactccggcggtggctcaactcaagtttgcagaacaccggatctgcccagggcaaggccctcgtccacgaatttggccgggtaaaatcattttcttcattgtttcggtcgggtgaggctggatcacacgtcaattacttgtgcttttctcctggttgatcatctgttccagatttgcacttcttttttggtgatttttagtttgttccatctattcctttgagaccggtgatccaactgtatggcttaatcgagatgcata

SEQ ID NO: 9905 - DNA, 429 bp, Triticum aestivum
  Clone ID: LIB31-015-Q1-E1-F1
cgcaacaccctatagtgagtcgtattaatacgaaaagtgccaattgtggaaaactacatgctaagagttgcaaatatctgatgttctttaaaaaaggaaggcgacaactactcaaagcactcgtgctagcaccaggaaagtctcaagcaaatgtttcttttcctttgaaatctaaaggatatgaagccaatactccggaatcttgttttcctattcctgagggcaccaaaggtacttttctatgaaccccacaaatccagtgctccaaacgaagggctcaccgtcaaattgtccacttggaggtccttccagtgtgcgataatacgtcaatcccttaacactgagagaacatgcagcctcgtgaaaatgtgatcatttgcctcaaaatccatgtcgcaaagattgcaggcttaatcatggggcgaacct

SEQ ID NO: 9906 - DNA, 440 bp, Triticum aestivum
  Clone ID: LIB31-015-Q1-E1-F3
attccagggtcgacgttcacaggacaccactaagagaatggcaacatacatatcatcaaaatatcgaacacatatcaagttcacatgattacttgcaacatgatttctctcgtgacctcaagaatgaaagtaactactcacaaatgataaacatgctcaagatcagaggggtattaaatagcataatggatctgaacatataatcctccaccaaataaaccatatagtaatcaactacaagatgtaatcaacactactagtcacccacgggcaccaatctatagttttgatacaaagattgaacgcaagcgatgaactagggtttgagagaagttggtgttgtgaagatgttgatgaatataaccctccccaagatgggagagttgttggtgatgatgatgacgatgatttccccctccgaaaaggaaattcccccggcg

SEQ ID NO: 9907 - DNA, 443 bp, Triticum aestivum
  Clone ID: LIB31-015-Q1-E1-F8
ggtccagaattcccgggtcgactgtggacagcgaaaaacagtcttggaatgctctgtggaaagtgaaagttcctccaaagctgaaagttttcctgtggaggctggcccaacaatcgataccaacagttgatctgttgcaccatcgcaatatgtcaacaactacacgttgtggactctgtggagccgaggactcatggcaacattcgctattacactgtacggtagctaggtgtgtatgggctcttcatgatcaagatctagtggaagctctaaataacaccaaggagccggatgctaaacgttggctgtttgcgatccaggacatgctatctcctgaagagttcatcttggtagtcaccactttgtgggaactctggtttgcgcggcgacaggtactacatgaaaatattttccagagtcctctatcaactttacacttcatc

SEQ ID NO: 9908 - DNA, 468 bp, Triticum aestivum
  unsure at all n locations
  Clone ID: LIB31-015-Q1-E1-G1
cgcctgtangtagccgtccggaattccagggtcgaccgacaagacgacagaaggaggggcaaagatccaagtaacaagggacatggatgttcaacccggctcacagacaggatcggtcgatctttcgggcactcctgaccagataaacagagctgagcagttgataattgatgttcttgcagaggctgatgctggatcatctggcactatctctaatcggaagtacaacgcacctcaacctggtgctgagcaattccaaatgcaaattgctaacaataaggtgggtctggttattggtaagggtggtgagactataaaatccatgcaggccaaatctcaagctcgtatacaggtcattcctttgcatttgcctcctggtgatacttcaactgaaagaatactgtatattgatggtactgcagagcaaattgagatagcagagcagcttgtgagtgaggtcactagtga

SEQ ID NO: 9909 - DNA, 435 bp, Triticum aestivum
  Clone ID: LIB31-015-Q1-E1-G5
gtcctaaattcccgggtcgaccaatttatctcagatcacgctaagaactgctccgagaaatacgacggtgacctccctgaacgccttctcctgttcaggagcaatcattcccatgggcacaccggcgatccagaacacgttcatagccgtgagccataaagtggccttggtctgccaacgcttaaagtatgtaccggtacacttatctggtttcagtgcagcggcgaagccacttgccaaaaaattcctacacataataggtttttggattgctgggtaataggcaatttttcgactaatttaattcataaatagatgactagcatgacattgacaaaattaacgacatgctgatactgatataaataagcacgtaccaccacacattatgctagtcctgctaatacggaaataattagaagaaggataaacgcg

SEQ ID NO: 9910 - DNA, 449 bp, Triticum aestivum
  unsure at all n locations
  Clone ID: LIB31-015-Q1-E1-G6
ggtccagaattcccgggtcgacgcccataatgcaataaatattgatataaaagaatgatgcaaaatggacgtatcaactcccccaacggctcttaagtgacccgcactctagctaggcgagcatgcccaaacgccggcccgaactaggtatccacacatcactcccttgtgcactgttccaacgatgtttggatatcctttcactgctctcttagcttacacgcctatgcaactctgactttaactcttatttcttctggagatatcatctgaaacaagcaaatccatttttttagcgaagcatgacggcgctacgggatctggtacacatcatgcacacccatataaccttgtaagtatctgtcctccggtacaacatcaaggtcgattcctcttatttgatcaaccattcaccgtgtcaaaaatgcananggggatgcaaggagcac

SEQ ID NO: 9911 - DNA, 439 bp, Triticum aestivum
  Clone ID: LIB31-015-Q1-E1-G7
acggtcctaaattcccgggtcgacccgatagacaaacttgtcgaggcccgttctcccagagtgcccaccccttattctttcgtaagtacgatggagttcctgaagaaaggacgccgacttcatcatgatgaccgaagcagagaaatgaagacatcagtgtattggaccagcctcttccagaagtgcaagccaggatgagaagacccgctagattcgttaccaaaccttccccccttactcccctcttaaatctcgggacgagatttcttgtagtggaggagaattgtgacgcccggataatcatgctacagtaactccctgtgattaagctaatcatgttgctaaacagggcttgatcacatttgaatcaccttactttcttactcctagttcaaacttcaaatataattaaagtgaaaaataaaagttttcaaaaact

SEQ ID NO: 9912 - DNA, 447 bp, Triticum aestivum
  Clone ID: LIB31-015-Q1-E1-H2
attccagggtcgacgatcaggggcgggtgctggagtcgtctttgtgacgccaagcgaagggataatcccgtactcatttaccctaacttcagcagtttcaaatatttcggctgaatatgaggctttgataattgggcttgaattagctctgaatatggggttagattcactcattgtttatggtgactctcagttagtgatcgaccaactactgggaatttacatggtaaagaaagaagaattaatgccttacttccaacgagccaaggtgctcatgtccttgtttactgatctaaaaattcagcatattataagaagtcaaaacgaaaaggccgacgccttagcaggtttagccgctagtttgtcactaacttcacatcagatgatggacgttcgagttgaagaatgtaagatactacctatactcaccgcaagagaggagacgac

SEQ ID NO: 9913 - DNA, 405 bp, Triticum aestivum
  Clone ID: LIB31-015-Q1-E1-H7
acggtccagaattcccgggtcgacctcaggattttccttagaatttagcttccccgattacaaattatggaagcttcattcttgtccttgtagtacatccgtactaaagtcttactgcaggtaaagggttcacggaaatatggaattggggaatatataggagcactaccatcgttattacttcggtcttttttatatttggattggatgtactaaaaaggaaaggtcctttttttctttaattgtcatggtgacacatgcgcgtgcatcattctcacacaaacaaaaatcagtttgtctaattcatatctagatattttttaaggatgtcacattaagctcttacaaatatataatgcagcaacagccaaaaaaaaagctaaagcaggaaaaaaaaagcgggcg

SEQ ID NO: 9914 - DNA, 464 bp, Triticum aestivum
  Clone ID: LIB31-017-Q1-E1-B2
cgcctgtcggtagccgtccgaaattctagggtcgacaagaaccaagatgtgcttgattccatgcacaacgctctctctatctaccgcgagggttggcaactctgcgtcaacgagggcgaagcaccggctcttcgaggatttgcaggtgctgacacattggaccaacaccatgataatggcaactctgcctcgttaatgtcggccaccaacgatgataaggccaaaccgccccacatggccattgacctcacctccaacgggaggaatagattaggttttcagttgtttttagggttttctttgttatgtataaattacttcgaaatgattgaaaaatcggtgtccaccttatttgatcactctggttggatggcctccgcccagctggctatccacaaacatgtccgacaatttttttgaaggcgtacttatttgtaatcaagcaagcggcaaaccaatacatg

SEQ ID NO: 9915 - DNA, 404 bp, Triticum aestivum
  Clone ID: LIB31-017-Q1-E1-C1
attccagggtcgacccagagttaattactctggttgaatctgatccttcccatggttatgaaactgaaactgttgtggcacatcttactaagttgaatgatatagccaccctttttactgatgatgagaaaactcgctattactttattctcaaattatttcctttctcattagagggtgatgctaaagcttggtacaatactcttgctcctggttgtgtgcgtagtccccaggatatgatttattacttctctgaaaaatattttcctgctcatatgaaacaagctgccttacaggaaatatttaactttgtgcaaactagagaagagagtctcccacaagcttgggggaggctttgcaaattacttaatgctttgcctgatcatcctcttaagaaaaatgaa

SEQ ID NO: 9916 - DNA, 426 bp, Triticum aestivum
  unsure at all n locations
  Clone ID: LIB31-017-Q1-E1-C6
gtccagaattcccgggtcgacataacaaccaaacgatggtgatatcttccatgctacacacattataggcggttcccaaacagaatggtaaagtttatactccccctccaccaacaagcatcaatccatggcttgctcgaaacaacgagtgcctccaactaacaacagtcccagggggggttttgtttgcaattattttggtttgatttgcataaagcatgggattgggcatcccggtgaccagccattttctcgtgagtgaggagcggagtccactcctcttgagaataacccgcataacatggaagatacggatagccctatttgatacatgagctatttgagcatacaaaacagaatttcatttgaaggtttagagtttggcacatacaaatttacttggaacggtaggtanatactgcaaat

SEQ ID NO: 9917 - DNA, 420 bp, Triticum aestivum
  Clone ID: LIB31-017-Q1-E1-C8
ggtccagaattcccgggtcgacagcaacattgaaaactctgcagccgcgaccagtgaagcgaagaaagaaatcggcaaagcgtccaagactcagaagtcaaattcatccttgctttgcctgcttatggtgatctttggggttgttttgcttatcgtgataatagttttggcatcttgagacacggatgcttagaggcctattggtgccctctgaggagccatattacgtgcaagattaatcctcgctgtgcgccgaagactgtcgctaactgaagtgtacattttctttttctctcttcttttttccttgtggtttgtgagtgcgtattcttgtgtggcgcgagtcctttttttcccacggcttgccctgagtgaacagtcatgctctttttcacctacaaaggtttgtttgctgctttg

SEQ ID NO: 9918 - DNA, 419 bp, Triticum aestivum
  Clone ID: LIB31-017-Q1-E1-D1
attctagggtcgacgcgcccctccgcgggaagtactgcgtgtgcttcgatccgctggacggctcctccaacatcgactgcggcgtctccatcgggacgatctttgggatctacatgatcaaagacaaggacaacgcgactctggaggacgtgctgcaacccgggactgacatgatcgccgctggctaccgcatgtacaggagctcatgcacgcttgtgttgagcaccgggaacggtgttaatggcttcactcttgatccttcccttggggagttcatacttacccatcccaacataaagataccaaacaaagggaagatctattcggtcaatgaagggaacgccagaaactgggacgcgcccacagcaaaccaacattgcaggtacgtggagagatgcaagtttccccaagacggctca

SEQ ID NO: 9919 - DNA, 414 bp, Triticum aestivum
  Clone ID: LIB31-017-Q1-E1-D2
tccgaaattcaagggtcgaccacaatgataatcttccagcatgcatgtgtgctgctagctcttgatggatggtcactcgatttcagctgccattgtgcatcaccatctcctggatgccttgatatctgtgttgctttgttgatctttgtgtagctcttgacataatcggctactgttaacaacttgaaccagtaataatctgcttgatgatagaaaccttcttgttccttcagaagaacagagctaagtgcagggtccatttttctgaaggaaacactggattcagttaaaagaaaaaggaaacactggatttctccaccaaatggcaagcagaaaaagatgtctagtttggtaattttcaacgccttacaagttactgtacttgattagccagaaggaatataatgttctttt

SEQ ID NO: 9920 - DNA, 424 bp, Triticum aestivum
  Clone ID: LIB31-017-Q1-E1-D3
atagtgagtcgtattaagcgatgaatgagattaatgcagctgcaaggatgagggtggctgcaaacgacaaggcggatgctgagaagattgtccagatcaaccgtgccgagggtgaagcagaagccaagtacctgtctggcctgtgtaacgcccgccagcgccaggccattgtggatggcctgacggacagcgtcctgtgcttctcagtcaatgtgcctgtcaccactgcaaaggacgtgatggacatggtgctgatcacccagtactttgacactatgaaagaggttggcgcgtcctccaagtcctcggctgtgttcatcccccaatggccctggcgccgtgcccgagattcccacgccagatccccgacggtcttcttcagggccaatctgcctctgacaactaatcactttgcttcgccggc

SEQ ID NO: 9921 - DNA, 447 bp, Triticum aestivum
  Clone ID: LIB31-017-Q1-E1-D6
ggtcctaaattcccgggtcgacgttcttgcaaaatttcggaacaactgtcttgttgcaggaatacatagaagaagctagagatgttgggtcctattgtagtggagtttttgcaataggagtcttgttacagaaaaataaagaagaagttttacatcaagggtcttgttgcagaaaaatagagagaaaaagtttcgcaataggtgtcttgatgcagtaaattaaagaagagaatattttgcaatagaggtcttgttgcaaaaaattggagaagaagagatttttgtcacatggctcttgttgcagaaagttacacgagaagaggtttcacaacaggaacattgctgcaagaaattacagaacaagaatggacggctcgcctcttacaatcggacggctcacgaggcagcgggtcttttaaaagattcttcggccgacgcatagcactg

SEQ ID NO: 9922 - DNA, 442 bp, Triticum aestivum
  Clone ID: LIB31-017-Q1-E1-D7
attcccgggtcgacattgacaaagctgttgagtggactctatttgggtgcttttggaccaacggtcagatttgcagtgcgacatctcgtcttcttatccataaaaatatcgctaaagaattcgtcgacaggatggttgcatggtccaaaaatatcaaggtgtcagacccgctcgaggaaggttgcaggcttgggccagttgttagtgaaggacagtatgagaagatcaagaagtttgtagcgaatgctaaaagtgaaggtgccaccattctgactgggggtgtcaggcccaagcatctggagaaaggtttcctcattgaacccacaatcatcactgacatcaacacatcaatggagatttggagggaggaagtctttggtccagtcctctgtgtgaaggaattttctaccgaagaggaagccatcgaactggccaatgatac

SEQ ID NO: 9923 - DNA, 450 bp, Triticum aestivum
  Clone ID: LIB31-017-Q1-E1-D8
taaaggtcctaaattcccgggtcgacgaccgttataaaggcgagatccacgtgaccatcatcgcaacaggatttccgcagtccttccagaagtcccttctggctgacccgaagggagcacggatactggaggcgaaagtaaaagcggctagccttgcaacggctgctgcggtgcaacaaccggcagcggccgtcccgacatggtcccggaggctcttctcctgaacactgtttagcaggcaaacaaccttgcgattgtgaggctgtggttcttactttctcgaggcagtagagagttttagccggtgttattctttttggctgtgtaaacactctgaaaactagtttcgcgtagtgattaggttctcgtctagtgtatgtattgttcagacacttgactcggttgttttagaaagtgttctgttcgttgacagctttggcaaccccaggg

SEQ ID NO: 9924 - DNA, 450 bp, Triticum aestivum
  unsure at all n locations
  Clone ID: LIB31-017-Q1-E1-E3
attcaagggtcgaccaagagagataaagtggattgctataatatcgagtatgaacagatcccccacttttgcttttcgtgtggacgactggggcactctgatctcttttgtcccacgccagggactcgcgatgcaaagggcgatctccccttcaattctagcctcagggcggctgaggatcggaagaagggtttttctggtgagagctcatccaaggaacggtatgaaacaaggcaaagcacgaaggaatcatggacaccaagctctcagcagaacaagggagtcgaggttacttccccagtgaagaacccctcattgaacaagcgcaagggtgggccgcaacaggtttaccgtanggtggaaccagccccgctcgccatgacagaacatggggaagtgcatgcgactactgaagaagcatcaggaaaaagctcagctgcagattctgaa

SEQ ID NO: 9925 - DNA, 427 bp, Triticum aestivum
  Clone ID: LIB31-017-Q1-E1-E5
ggtccagaactcccgggtcgacaggagcgcatacgatatgtggtatttgctcgtcaggaccactgcacaaatattcgcttcgccggatgagatgggtgagctgatgactaaaatggaagattttacgcaccgagggtgggtctgcgatcactccatagtgttctgagggggattcaattcagcactagacagccaaaaggaagacacaataagctggccaagctcatatgcatgcacctctgccaactgaaccatctaatacctcaccggagtatgtaatgctatctaggctgatgaatgaattatctggtgcattatggttagcaacatggcatgctgttctgttttccctcattgatccggctgtccattaacttgcttttaactgaacttctattggattgtcttagctttaataacctctttt

SEQ ID NO: 9926 - DNA, 268 bp, Triticum aestivum
  Clone ID: LIB31-017-Q1-E1-E7
attcccgggtcgacgaagacgtacgaactcagggtggtgatcatgtaatccattgccatggaatgggttctgttaagccagatcgtcatctctaggatgagaacgacatcctggtaaacctgcatcagaagacgcgtcagaacattggtcgcatgaaagttgccttctcaatgatgggtatgtcgaagacgtgtgtgtgaacacgagtgcacgaatctcttccatttgcagtagacatcttcgcgatcaagatcaccgcgaatacttg

SEQ ID NO: 9927 - DNA, 455 bp, Triticum aestivum
  unsure at all n locations
  Clone ID: LIB31-017-Q1-E1-E8
taacggtccagaattcccgggtcgactaacagagcaatgtctgtaggtgtgctaacaggtcgtcctgcagaggagatgcctggttctatgggtgaccttcttcctgagctctcgcaactgcttgatcaagtttggcaggtgatgcaaggcatcgcccaggccctgtggccatccgtctccatgcccgaaggtcttggagagcttgcgatgaatctaaagggagcacggcggcgcttccgattgtggaagatatcagcctgccgtcaaggcgctagggaggcctgggccatggtgaagacgcggtacacaaaggctgaccccaaccacatggccgaggtcggtcctgtanggcccgatgggaaggagatccttgtaaggttagtatacggccaagtagagttggccgcanagtattcctagtaggactgtaaattagacagcctgttagatggtat

SEQ ID NO: 9928 - DNA, 443 bp, Triticum aestivum
  Clone ID: LIB31-017-Q1-E1-F4
tccggaattctagggtcgacgcatcatcaaaccgaccagctgccatgctgcctatgagtcattttttaggagcaatgtcagggactcgacatccatttggacctccgaatcaggaccggccgcgtcacgagcctcttgtgttatcaagtgttccttgcacgaccactcgagagcctccgttccttctcgggccatcgcaggagtccccccttcgatcccttcagttgaccttaccggccgagatgatctttcaagaggaggcaatgctaaagcatcggctaagttcaactcaggagaccacctcgatgccagatttgggagcggtacggctgactcgggtctgagggcggaatcgaagtaacttcgcgatcaaaatggacagatgacttggaatttctggaacatttgctcattggagtgctccatttaggcagacaggcaat

SEQ ID NO: 9929 - DNA, 426 bp, Triticum aestivum
  Clone ID: LIB31-017-Q1-E1-F6
attcccgggtcgaccatccatcacaaaaccacagtaactcatgccattttaagtgatataaaaactattcgctaattttcagtaaaccccttgttcttttgcttaataaacccacagttctatttttaagtgagtttaaagactttttaaaatactagcaaaacgacccatgcgtcgcaactgaagaaaaaaaaatcataatctctaatggtcatgaccacattttgctgcatcaccgagatacactatcactttcattttcgtgaaatcgtgaacaatttttgaaaatcatgaacatttttttaactgatgaacatatctgaaatcgtgaacattttccaaatacttgaacaattttaaaaaattgcaaactttgtccaaaatcataaacgttttatgaattcatgagcattttatactatttgc

SEQ ID NO: 9930 - DNA, 443 bp, Triticum aestivum
  Clone ID: LIB31-017-Q1-E1-F8
attcccgggtcgacggcggcggggtccagatccggtgctcctccccctcccaatccatcttccaggcaggctcagcctccaggcgcccctcgacgccgcactgcacctcatcgaccaggaccctggtcgccgccgtcacggtctcctcctccctggtggccgcggacgccaactcgtgcatctgcccaggaatccatgaggcaccacctggccgtctctgtggcggattacgacagatttgcgaccaagctcaagacccccggcacagacttgttcgccaagacgcaacccgatggccgcgcgcgccaagtgttcttcctcgaccgggacgcatttgtaagggagtggtgttccatgatgtaagggcgtgctctgataaaaacatgacatgacaatagaggtagatttgacaactggatgcccaggcttagataggaactgag

SEQ ID NO: 9931 - DNA, 428 bp, Triticum aestivum
  Clone ID: LIB31-017-Q1-E1-H5
gtccggaattcgcgggtcgaccgcatcccgccagcccagacctgaggatgcccttttcaaggatcttgttgattttgccaagaagaatccatcttctccatctaaaccagccaacagccgcaggactcgctgagtgatgagtgtttcagtcatgtaacacacataattgagttgccaggctgctggttttgctacaggtcggcgaattaggtatatcatcaaataagagggttcggtcggtctgttctttattgcctcagggaattatttggtctgcgcattggacaattagagtcacaggtgtcagatacgtagtcatgatactgggtgtggtgtgtagcgagttgcatttctcacctttttcttgtgtggtattggttaccgattcttgctttattttacttagctgtatatatttctccatttga

SEQ ID NO: 9932 - DNA, 442 bp, Triticum aestivum
  Clone ID: LIB31-017-Q1-E1-H6
attcccgggtcgactaatttattcgactatatggagatggagcagaaggtcagctatgtatgccaaggcagtgctaaaaacaataaaactacagcaatagcgacaaatgctctaaaaacagtaaacatgagacattaatacctgattagcggcagcagcatcatcgacatcgtcctcgtcatcagcattgaagtcagcatcatccttttcctctggattaacacgagaccacttctttgcaggtggaaccttgcgcttcacgccgcatttcttccccttaccagatgcaccagcaccaagtaaagaaggtgtagactcggcagtggcaagcacacgaggactacagcgtggcgtaccaccaaggcctaacccttcatcttcaacaacttctgcaggccttgaaatacgtgggctctttcgaggagttacttcaccaactact

SEQ ID NO: 9933 - DNA, 416 bp, Triticum aestivum
  Clone ID: LIB31-017-Q1-E1-H7
cccgggtcgacatcaaggaggtacctgacttcaacaccatgtacgagctgtatgatccgtcaacggtgatgttcttcttccgcaacaagcacatcatgattgatctcgggacgggaaacaacaacaagatcaactgggcaatgaaagacaagcaagagtttgttgacattgtggagactgtctacagaggagctcgtaaggggcgtggtctggtgattgctcccaaggattactccacaaaataccgttactgaggtatctgtgcctggctattcatgtgcagtgtgtggcctgctctgttccgtgatatgcgctgtgtgacccttgatgtaatgtctgtcaactttgaaagtgtcgtaactatgtatttgtatcttgaatatcaacatgtcataaacctgcaaccctttaaaaca

SEQ ID NO: 9934 - DNA, 440 bp, Triticum aestivum
  Clone ID: LIB31-017-Q1-E1-H8
tcgcgggtcgacgtcatccacaaagatacgctaccatcacatcgaaagacaggacacctttgcctctatcaagtggtatcagttttcagattgcttggtgagattttccagtttttcatagctaagatcgagtctgttcttcatacctacagtccacgaaaaaagccaaaaaattagggttagttcatcatatccaaaccaatctgagcctttgcatagtctttttagagttttgctttgttgaatttgcggttgcatcatcatgtcgagttgctggtcttagcgtctagtcccttagagtttcgagttctgttcataggttgtcatgccgctgccgcaccatcgtcatcatcattgccatataccaccaccccaaccctatacatcgccactgccatatacgaacaccaatccgagttcgcatataacatcgccatata

SEQ ID NO: 9935 - DNA, 405 bp, Triticum aestivum
  unsure at all n locations
  Clone ID: LIB31-017-Q1-E2-A1
cgcctgccggtaccggcccgaaattcncgagtcgacatcatgagcttactgaagtttgtcgcagttgtggtcgtccacgagacgatacccttcatactatgtgtaaatgcccctggcgacgaacctgtgggatgcaatggcgaaagatttgcctagccctgatgtggattttgttcacaacaatggccctgaatggatgttctcctgctcgagccaatcacaaatacgccaagcgtggtgttgctgaccatgtggcgtacttggcacgtccgtaacgagataactcgtcagaagaatccgccccctacagaggcctcctgcagatttctccatggatatattaactccctgctatataaccggcaacatgctatacctgatattgttaaaggcaaaacggtggtg

SEQ ID NO: 9936 - DNA, 460 bp, Triticum aestivum
  Clone ID: LIB31-017-Q1-E2-A12
acggtccgagattcccgggtccacagatttactaagaatgctcacttcattcctttgaaacatcctttttctgctcctgtagtggccaaggctttcctccacacattggtcaatctgcatggacccccacacaccattgtgtctgatagagacaagatattcactagtcatttttggagagatttgttcaaactgcgggacactaagttgctcatgagtactgcttatcatcctcaaaccgatggacggagtgagcgggtgaaccggtgtttggagatgttcctcaggtgtgcagttcatgatacgcctactaagtggcatgcttggctgcccttggcagaattctggtacaatacaaattatcactcatctctggagtgctctcccttcaaggccctatatggatatgaaccaacttatggagtctttcctagtctgctacagtctgacaacatagatg

SEQ ID NO: 9937 - DNA, 162 bp, Triticum aestivum
  Clone ID: LIB31-017-Q1-E2-A7
tcccgggtccactaggcgtgtgcaattgcttgctatccgagtactagagctagcttatcttttgggttactgtcgcgtggtcggtttgtcttttgtggtttactgtgcctagcctgccctaatggggctatgggagtggtctgtggagttcccgggactgcg

SEQ ID NO: 9938 - DNA, 435 bp, Triticum aestivum
  Clone ID: LIB31-017-Q1-E2-B10
taccggtccgagattcccgggtccacccgctccgggagttcgccaaggacagcgttcgcctcgtcaagcgctgccacaagcccgaccgaaaggggttcaccaaggtggccattcggacggccatcgggttcgtcgtcatgggcttcgtcgggttcttcgtcaagttcatcttcatccccatcaacaacatcatcgtcgggtccggctgatctcgtctccgcaggtgaggggccgcaggacgagaggatggtgtccattcatggaggcggcgctggttttcttatcctcgtaccttaaagcaattcatttaggacttcattgtagaggacagttcccttgtgttttcatttgaaacagttgtattggtagacctggagcagttttgaacctgattccggctagaccgtaatatcaagcagtgaatgacaagaattg

SEQ ID NO: 9939 - DNA, 442 bp, Triticum aestivum
  Clone ID: LIB31-017-Q1-E2-B8
cggtccgaaattcccggggcgaccggaagggagatagtgttcttcgcgctgctcgtgggggcagagctcgacggcctcaccaacctgcagccccgcggcggctgcgacgaccccagctacccttactacttcaagtgcaagttatgttcgagggatggatcagttgtgatgattcctgggcagggaacaccactaactgctgagcagagccagaaaggagagatgacttgtttgatggtctttgaatgcagaggctatgaacctattgagttcgcttttggtactggctggaaggctgaatctgtacatgggacaccatttgacattgatctttctgaacgagagtttgatgagtatgatgagaagggagagtgccctgtcgctctatccaagctgcagtcaacattcagagtggtgaagaagcagggttttcatgggaaga

SEQ ID NO: 9940 - DNA, 460 bp, Triticum aestivum
  Clone ID: LIB31-017-Q1-E2-C1
cgcctgtccgtaccgctccgaaattcccgaggtcgacccagagttaattactctggttgaatctgatccttcccatggttatgaaactgaaactgttgtggcacatcttactaagttgaatgatatagccaccctttttactgatgatgagaaaactcgctattactttattctcaaattatttcctttctcattagagggtgatgctaaagcttggtacaatactcttgctcctggttgtgtgcgtagtccccaggatatgatttattacttctctgaaaaatattttcctgctcatatgaaacaagctgccttacaggaaatatttaactttgtgcaaactagagaagagagtctcccacaagcttgggggaggctttgcaaattacttaatgctttgcctgatcatcctcttaagaaaaatgaaatacttgatatcttctataatggactaaccgat

SEQ ID NO: 9941 - DNA, 448 bp, Triticum aestivum
  Clone ID: LIB31-017-Q1-E2-C11
ttcccgggtccacgtatcataggcgacttctgtccaatgagtggataacatctgtcccaacgatgagccgacacgtgtttcctccagccaatgatgattttacatgtggaaaatccccattggtcggggctgttaacgggttatcggatccaaaacccgacccgttagcttaacggcgttccgttacggtggatgccacgtgtcggtcacccttgacgaaagcacttctgtgacgcgcgatttatcgtcatggaagtggacacttccgtgatgataattttggtaatgtcatggaacacttctacgacaacacaggtatgactatcttgattctgacataaatttgtcatggatgtacatgcatgacaaaaaacgcgacctactgtgacaaacatgtatcatcacggaagtgtattttttttgtagtgtgcaaacttcgccggtgcat

SEQ ID NO: 9942 - DNA, 440 bp, Triticum aestivum
  Clone ID: LIB31-017-Q1-E2-C6
ggtccgaaattcccgggtccacagcaacattgaaaactctgcagccgcgaccagtgaagcgaacaaataaatcggcaaagcgtccaagactcagaagtcaaattcatccttgctttgcctgcttatggtgatctttggggttgttttgcttatcgtgataatacatttggcatcttgacacacggatgcttaaaggcctaatggtgccctctgaggagccatattacgtgcaagattaatcctcactgtgcgccgaagactgtcgctaactgaagtgtacattttctttttctctcttcatttttccttgtggtttgtgaatgcctaatcgtgtatggcacgagtccttttattcccacggattacactgagtgaacagtcaagcactttttcacctacacaagtttgtttgcagcattgcttgagtcatagacgtgaca

SEQ ID NO: 9943 - DNA, 452 bp, Triticum aestivum
  unsure at all n locations
  Clone ID: LIB31-017-Q1-E2-C8
ggtcctaaattcccgggtccacataacaaccaagagatggtgatatcttccatgctacacacattataggcggttcccaaacagaatggtaaagtttatactccccctccaccaacaagcatcaatccatggcttgctcgaaacaacgagtgcctccaactaacaacagtcccagggggggttttgtttgcaattattttggtttgatttgcataaagcatgggattgggcatcccggtgaccagccattttctcgtgagtgaggagcggagtccactcctcttgagaataacccgcataacatggaagatacggatagccctatttgatacatgagctatttgagcatacaaaacagaatttcatttgaaggtttagagtttggcacatacaaatttacttggaacggtaggtagatactgcagatangaaggtatantggactcatatgg

SEQ ID NO: 9944 - DNA, 464 bp, Triticum aestivum
  unsure at all n locations
  Clone ID: LIB31-017-Q1-E2-D1
cgcctggccgtaccgctccgaaattcncgaggtcgacgcgcccctccgcgggaagtactgcgtgtgcttcgatccgctggacggctcctccaacatcgactgcggcgtctccatcgggacgatctttgggatctacatgatcaaagacaaggacaacgcgactctggaggacgtgctgcaacccgggactgacatgatcgccgctggctaccgcatgtacaggagctcatgcacgcttgtgttgagcaccgggaacggtgttaatggcttcactcttgatccttcccttggggagttcatacttacccatcccaacataaagataccaaacaaagggaagatctattcggtcaatgaagggaacgccagaaactgggacgcgcccacagcaaaccaacattgcaggtacgtggagagatgcaagtttccccaagacggctcatcaccaaaatccttgagataca

SEQ ID NO: 9945 - DNA, 461 bp, Triticum aestivum
  unsure at all n locations
  Clone ID: LIB31-017-Q1-E2-D10
ggtccgaaattcncgggtccacgcgttcagatgcaccaccggtaatgacattgatgccggattgccggtgcgtgcgtgggagcttgttgcgtcaaattgctttcgagtgacgaagcccaactccctgtttcatttctgtaatcagataacaaccgtgccgtgccatggcaggcttcaacagtgttgagctccaaggcaccatcgactacttgtcaatcacgccggcggcccgcgctggatgttaccatgtaatggatgaagcaaatgcccactgatttagaaccagcggattggttcctggtacgccgctggtttcagtgtctgaacctaatgatttagaaggtgtcaaaccaaatgatgtatccgctggttcatccaattcagtgccgaacccaatgatataatggatgaagcaaacacccaccgattcatccattatgatgaacctccaactacaacag

SEQ ID NO: 9946 - DNA, 460 bp, Triticum aestivum
  Clone ID: LIB31-017-Q1-E2-D12
ggtccgaaattcccgggtcgacagcacccaactcatatgttcttccgcaggacccctctcttatttacacgatgagcttcctggttgctggattgatctgggcacttgttacgctgccacggagcggtatgcggcctaacaagacgcttggggttggcctcattgttctctactcagttttccttttcattagagtaagcagtgctatggggatattgccactcccgggcttgaattagttgtttgtgtctattgtacatgactgtcctgtatacagatgaaatggggttgtacattgttcctttgttctgttgttatgcctcaaatttggttgtatgcctgtcaggctttcagagacaataaagccagagcatgcctgcaactggtctacttatttgtacaaaaaaaataaaaaattaagtaaacaaaaagcggccgctctatatgatccaagcttacg

SEQ ID NO: 9947 - DNA, 470 bp, Triticum aestivum
  Clone ID: LIB31-017-Q1-E2-D2
tggtacgcctgtccgtaccggctcgaaattcccgagtcgaccacaatgataatcttccagcatgcatgtgtgctgctagctcttgatggatggtcactcgatttcagctgccattgtgcatcaccatctcctggatgccttgatatctgtgttgctttgttgatctttgtgtagctcttgacataatcggctactgttaacaacttgaaccagtaataatctgcttgatgatagaaaccttcttgttccttcagaagaacagagctaagtgcagggtccatttttctgaaggaaacactggattcagttaaaagaaaaaggaaacactggatttctccaccaaatggcaagcagaaaaagatgtctagtttggtaattttcaacgccttacaagttactgtacttgattagccagaaggaatataatgttcttttacaggtccagtgtggctccttgattcaggggaagc

SEQ ID NO: 9948 - DNA, 449 bp, Triticum aestivum
  Clone ID: LIB31-017-Q1-E2-D5
ggtcctaaattcccgggtcgacgaatctctggatatggtgattcatgaaacccatggtatgatgtgtaaacacagtcccccctggcgaatggaagtagcataactcggtaatcatcgccggtgatatgatcgatgattggttggatgctcggataattgagcccgaggaacatggagtggttgccgaggctgtaaacccgcctccaattgaatacgcctggccaaacaaagctgggatctttctcgaacacgaagcagccagagccgtcaatgtcacgaacgcccgaggcattgtaccgcatgtggtttgatgaaatggtttggtcaatttggtacgtgcaaatgagcatcaaatgacaaccgtcagctgaacgaacgataaaccaccacccatcggctggtatgattccaggtcctagaatcatgaaggccagcgcatttgcgtctgc

SEQ ID NO: 9949 - DNA, 457 bp, Triticum aestivum
  Clone ID: LIB31-017-Q1-E2-D6
gtaacggtccgaaattcccgggtccacgaccgttataacggcgagatccacgtgaccatcatcgcaacaggatttccgcagtccttccagaagtcccttctggctgacccgaagggagcacggatactggaggcgaaagtaaaagcggctagccttgcaacggctgctgcggtgcaacaaccggcagcggccgtcccgacatggtcccggaggctcttctcctgaacactgtttaacaggcaaacaaccttgcgattgtgaggctgtggttcttactttctcgaggcagtagatagttttagccggtgttattctttttggctgtgtaaacactctgaaaactactttcgcgtagtgattaagttctcgtctagtgtatgtattgttcagacacttgactcggttgttttagaaagtgttctgttcgttgacagctttggcaaccccagggctcgtc

SEQ ID NO: 9950 - DNA, 453 bp, Triticum aestivum
  Clone ID: LIB31-017-Q1-E2-D7
ggtcctaaattcccgggtcgacattgacaaagctgttgagtggactctatttgggtgcttttggaccaacggtcagatttgcagtgcgacatctcgtcttcttatccataaaaatatcgctaaagaattcgtcgacaggatggttgcatggtccaaaaatatcaaggtgtcagacccgctcgaggaaggttgcaggcttgggccagttgttagtgaaggacagtatgagaagatcaagaagtttgtagcgaatgctaaaagtgaaggtgccaccattctgactgggggtgtcaggcccaagcatctggagaaaggtttcctcattgaacccacaatcatcactgacatcaacacatcaatggagatttggagggaggaagtctttggtccagtcctctgtgtgaaggaattttctaccgaagaaggaaccatcgaactggccaatgatactca

SEQ ID NO: 9951 - DNA, 453 bp, Triticum aestivum
  Clone ID: LIB31-017-Q1-E2-D8
ggtccgaaattcccgggtccacgttcttgcaagtattcggaacaactgtcttgttgcaggaatacatagaagaagctagagatgttgggtcctattgtagtggagtttttgcaataggagtcttgttacagaaaaataaagaagaagttttacatcaagggtcttgttgcagaaaaatagagagaaaaagtttcgcaataggtgtcttgatgcagtaaattaaagaagagaatattttgcaatagaggtcttgttgcaaaaaattggagaagaagagatttttgtcacatggctcttgttgcagaaagttacacgagaagaggtttcacaacaggaacattgctgcaagaaattacagaacaagaatggacggctcgcctcttacaatcggacggctcacgaggcagcgggtctttttaaaagatccttcggccgacgcatagcactgcccta

SEQ ID NO: 9952 - DNA, 376 bp, Triticum aestivum
  unsure at all n locations
  Clone ID: LIB31-017-Q1-E2-E1
cgcctgttggtaccggctcgaaattcnctagtcgacaattgcattcaagcccaacacagccgatgatccccatatgagaaagcccgatattaccaaggccaagcaactgctaggttgggagccaaaggtatctctgaaggaaggccttcccttgatggtgacagatttccgcaaaaggatcttggatgagtaatcaaggcaacagtgagatgaatctatttggttctgaatgctgcgaatataggcaaacgcgcttcaccaactggatccgttcagtacaattctgtgtttgtataacgaccttgtagaatcatttaaatttgttttcgtcttggtgagactggacagaagtaaccaatggttttttgttcaaaaa

SEQ ID NO: 9953 - DNA, 469 bp, Triticum aestivum
  Clone ID: LIB31-017-Q1-E2-E10
cctgccggtaacggtccgaaattcccgggtcgaccccctagggtttctggaatattggggtatttatagagcaaagaggcggtgcgggaggcacctaggtgggcataacccacctgggcgcgcctcggcccccaggtgcgccctggtgggtcgtgccccccttggggcacccctctcgtacttcttcagcccatcttgtgtcttctggtccagaaaaaaccacaaaaagttttgctgcgtttggactccgtttggtattgatatcccgcgatgtaaaaaacatgcagaaaacaacaactggtactggacactatgtcaataggttagtaccaaaaatgatataaaatgactataaaatgattgtaaaacatccaagaatgataatataacagcatggaacaatcaaaaattatagatacgttggagacgtatcagcatccccaagcttaattcttgctcgtcctcgagt

SEQ ID NO: 9954 - DNA, 466 bp, Triticum aestivum
  Clone ID: LIB31-017-Q1-E2-E11
taccggtccgaaattcccgggtccacattgacgggagggacattgcatcaactccggattcgaagcaggctgcggcatcttcgaaacttcctgtggagactgctgctgcatccactgcggtgccccctcatgcagacgtgtaccatttaggcagccagtcacagcgttccgccttggccagccaaaggtccgggcagctacagaggccaatccagaaatggaaaggccctgacaagatcagcaggatctatggtgattggatagacgaaactgactaggaagaggagcgccgtgtctgtctcctttacccagtttagttctagttggcactgctggaagagtctgcgtgttgtaagactaaaacattatgctgccgcaacttgtattgtgtctgttgtatgcgtgattgcagtgaactcgccgctgggagagctgtatggatggtagtgttctggtcttctggata

SEQ ID NO: 9955 - DNA, 472 bp, Triticum aestivum
  unsure at all n locations
  Clone ID: LIB31-017-Q1-E2-E3
cgcctggccgtaccggcccgaaattcccgagtcgaccaagacagataaagtggattgctataatatcgagtatgaacagatcccccacttttgcttttcgtgtggacgactggggcactctgatctcttttgtcccacgccagggactcgcgatgcaaagggcgatctccccttcaattctagcctcagggcggctgaggatcggaagaagggtttttctggtgagagctcatccaaggaacggtatgaaacaaggcaaagcacgaaggaatcatggacaccaagctctcagcagaacaagggagtcgaggttacttccccagtgaagaacccctcattgaacaagcgcaagggtgggccgcaacaggtttaccgtanggtggaaccagccccgctcgccatgacagaacatggggaagtgcatgcgactactgaagaagcatcaggaaaaagctcagctgcagattctgaa

SEQ ID NO: 9956 - DNA, 450 bp, Triticum aestivum
  Clone ID: LIB31-017-Q1-E2-E5
cggtcctaaattcccgggtccacaggagcgcaaacaagatgtggtatttgctcgtcaggaccactgcacaaatattcgcttcgccggatgagatgggtgagctgatgactaaaatggaagattttacgcaccgagggtgggtctgcgatcactccatagtgttctgagggggattcaattcagcactagacagccaaaaggaagacacaataagctggccaagctcatatgcatgcacctctgccaactgaaccatctaatacctcaccggagtatgtaatgctatctaggctgatgaatgaattatctggtgcattatggttagcaacatggcatgctgttctgttttccctcattgatccggctgtccattaacttgcttttaactgaacttctattggattgtcttagcttaattaacctcttttatcttaatgaataatatctttt

SEQ ID NO: 9957 - DNA, 456 bp, Triticum aestivum
  Clone ID: LIB31-017-Q1-E2-E6
ggtccgaaattcccgggtccactaacagagcaatgtctgtaggtgtgctaacaggtcgtcctgcagaggagatgcctggttctatgggtgaccttcttcctgagctctcgcaactgcttgatcaagtttggcaggtgatgcaaggcatcgcccaggccctgtggccatccgtctccatgcccgaaggtcttggagagcttgcgatgaatctaaagggagcacggcggcgcttccgattgtggaagatatcagcctgccgtcaaggcgctagggaggcctgggccatggtgaagacgcggtacacaaaggctgaccccaaccacatggccgaggtcggtcctgtagggcccgatgggaaggagatccttgtaaggttagtatacggccaagtagagttggccgcaaagtattcctagtaggactgtaaattagacagcctgttagatggtattgaag

SEQ ID NO: 9958 - DNA, 329 bp, Triticum aestivum
  Clone ID: LIB31-017-Q1-E2-E7
ggtcctaaattcccgggtcgacgaagtcttacgtactcagggtggtggtcatgcaatccattgccatggaatgggttctgtgaagccagatcgtcatcactagaatgagaacgagatcctggtaaacctgcatcagaagacgcgtcagaacattggtcgcatgaaagttgccttctcaataatgggtatgtcgaaaacgtgtgtgtgaccacgagcgcatgaatcgcgtccatttgcctgagaatcttcgcgacaagatcaccgcgaatacttgcctgcgcatggcacacatctgttgctacttgatcaatgcgattacgcacagcttc

SEQ ID NO: 9959 - DNA, 446 bp, Triticum aestivum
  Clone ID: LIB31-017-Q1-E2-E8
acggtccgaaattcccgggtccacatacacctacatacacatgtcaagcaggcgatgaatgagattaatgcatctgcaaggatgacggtggctgcaaacgagaaggcggaggctgagaagattgtccagatcaagcgtgccgagggtgaagcagaggccaagtacctgtctggcctgggtatcgcccgccagcgccaggccattgtggatggcctgagggacagcgtcctgagcttctcagtcaatgcgcctggcaccactgcaaaggacgtgatggacatggtgctgatcacccagtactttgacactatgaaagaggttggcgcgtcctccaagtcctcggcggtgttcatcccccatggccctggcgcggtgcgcgacatcgccacgcagatccgccacggtcttcttcagggccagtccgcctctgacaactaagcactttg

SEQ ID NO: 9960 - DNA, 459 bp, Triticum aestivum
  Clone ID: LIB31-017-Q1-E2-F10
ggtccgagattcccgggtccacatcgagccggatgcgcatgtcaagcaggcgatgaatgagatcaatgcagctgcaatgatgagggtggctgcaaacgacaaggcggaggctgagaagattgtccagatcaagcgtgccgagggtgaagcagaggccaagtacctgtctggcctcggtatcgcccgccagcgccaggccattgtggatggcctgagggacagcgtcctgggcttctcagtcaacgtgcctggcaccactgcaaaggatgtgatggacatggtgctgatcacccagtactttgatactatgaaagagatcggcgcatcctccaagtcctcggcggtgttcatcccccatggccctggtgcggtgcgcgacatcgccacgcagatccgcgatggtcttcttcaatgccagtctgcctctgacaactagcagttggctttgccggcatgaac

SEQ ID NO: 9961 - DNA, 456 bp, Triticum aestivum
  unsure at all n locations
  Clone ID: LIB31-017-Q1-E2-F2
ggtacgcctgccggtaccggctcgaaattcncgagtcgactctcacagaaaaagatagccaccatctcatcgaaacatcggaagaccttagcctctagcaagtggtatcagatttccaggttgcacggtgagattttacagtttttcgtagattagatcgagtctgttcgtcagtacctacaggtccacgatgaaagccacacaaaagattagggttagtgcatcatatccgaaccaatctgagcctttgcataatctttttagggtttttgcattgttgaatttgcggttgcatcgtcgtgtcaagttgatggtcttagagtccaatcttttagagtttcaagttctggtcataaattgtcacgccgccgccgcaacatcatcatcgcccatctaccacttttgcttatccgccaacgctctgaatccagatccatataccaccagcaatccgta

SEQ ID NO: 9962 - DNA, 460 bp, Triticum aestivum
  Clone ID: LIB31-017-Q1-E2-F4
acgcctgccggtaccggcccgaaattcccgagtcgacgcatcatcaaaccgaccagctgccatgctgcctatgagtcattttttaggagcaatgtcagggactcgacatccatttggacctccgaatcaggaccggccgcgtcacgagcctcttgtgttatcaagtgttccttgcacgaccactcgagagcctccgttccttctcgggccatcgcaggagtccccccttcgatcccttcagttgaccttaccggccgagatgatctttcaagaggaggcaatgctaaagcatcggctaagttcaactcaggagaccacctcgatgccagatttgggagcggtacggctgactcgggtctgagggcggaatcgaagtaacttcgcgatcaaaatggacagatgacttggaatttctggaacatttgctcattggagtgctccatttaggcagacaggcaat

SEQ ID NO: 9963 - DNA, 457 bp, Triticum aestivum
  Clone ID: LIB31-017-Q1-E2-F5
taccggtccgaaattcccgggtcgactggggttttcgacgggattgggtcggggatttttctcatgagataaggtaatcaacttaatttgcgagatattcactcatcacttaacgcagtccgtccgtcactgttaatcaacaggcggtaatcgttgtggaatcatttgttgttctatgcttatgtcttgggtgttcattcatgtatgtataatgcgagcacaaatcgggcaactgtggtagtggccacttggtaacgaggttctatctcatcgttctggatgacttcatggagcacgcggtatgttcaatctcaatctatcacggtcggcatagcataaatttgtgaacatataccgtctgttgctacgttatctatatatttgcatcagatcattgtaacattatctatttttaattctatagttcagtactttgcgtgcatctatatatggatat

SEQ ID NO: 9964 - DNA, 458 bp, Triticum aestivum
  Clone ID: LIB31-017-Q1-E2-F8
tacggtccgaaattcccgggtcgaccatccatcacaaaaccacagtaactcatgccattttaagtgatataaaaactattcgctaattttcagtaaaccccttgttcttttgcttaataaacccacagttctatttttaagtgagtttaaagactttttaaaatactagcaaaacgacccatgcgtcgcaactgaagaaaaaaaaatcataatctctaatggtcatgaccacattttgctgcatcaccgagatacactatcactttcattttcgtgaaatcgtgaacaatttttgaaaatcatgaacatttttttaactgatgaacatatctgaaatcgtgaacattttccaaatacttgaacaattttaaaaaattgcaaactttgtctaaaatcataaacgttttatgaattcatgagcattttatactatttgcaaaaaataaaaaattatgaac

SEQ ID NO: 9965 - DNA, 467 bp, Triticum aestivum
  unsure at all n locations
  Clone ID: LIB31-017-Q1-E2-G1
cgcctgccngtaccggctcgaaattcccgagtcgacatctactaaggcttcagcttaagtgggttcagccgccccaaatctgactcgatccagggttatatatcataaagggcttcgacaaggggtttgattcgttctttgagcaaaaagataaggtcggaataccggagttctttctttgcttccaagaacatagattccttcttcaacccaggtcatgaccgagggcgggtatctcactcgcatatctagagcccagcatctctcctgaacgacaccttctgcagactctactggtggtatttcccgaggcgagggtcaatatgtgcattcatatcggtcaggaaacgacaatgactcttcttctttccgggaagctatgggcacctcacaattcttatacgacattagtggaagcgaacattcgtagcattcattgtcaccgatcattgacaaaagaagaaaaa

SEQ ID NO: 9966 - DNA, 458 bp, Triticum aestivum
  Clone ID: LIB31-017-Q1-E2-G10
ggtccggaattcccgggtcgacgaagacgacagaagggatcataaagactagatacagaagttgatgccggactatcatccatccagagtatggtggagaacccaccttgcaaagccgaagacttatatccgcatactatatcatcattgaaggcaagttcgggggctactgagggagtcctagattcgggggtcctcaagtgtccgtcccaggagtatgggccaggttggatgggtcatacaagatcaagctgaagactatccttcgtgtccatgtgggacttctccatacgtaaactacaagattagagtccagatgtatcatttccttccctgatgaaccgaccttgtacaaaccctaggcccctccggtgtgtatataaactggaggggttagtccgtagaggctatccacattactatcatcagaatattcacaggctagacatctagggttt

SEQ ID NO: 9967 - DNA, 433 bp, Triticum aestivum
  Clone ID: LIB31-017-Q1-E2-G12
ttcccgggtcgacttccaccaaagcgatatccatcatctcatcgaaagacgggacacctttgcctctatcaagtggtatcagatttctaggttgctcggtgagattttacagtttttcgtagtttagatcgagtctgttcttcatacctatagtccacgaaaaagccaaaaaaaatagggttagttcatcccatccgaaccaatctgagccttgcaattttcttttcattgcttgcatagttgaattatcggttgcatcatcgtgtcgagttgctggtcttagtgtctagttcgtttagagtttcgagtttttttcacattagtcacgccaccgctgcatcattatctcttccgctgtccaccacccatccatcaatttccaccacgtgctacccaccattcattgtcataataatagttgggatctagtttg

SEQ ID NO: 9968 - DNA, 426 bp, Triticum aestivum
  Clone ID: LIB31-017-Q1-E2-G3
cgcctgtcagtaccggcccgaaattcccgagtccacactcttattgaggaagtgctctgcgagacgcccatcaacgagtatgtccagtcgtgtgacatcgttgccttcaacaagatctagaatctttgttcacccacttgttgctgctggattcttggtactgggatctgtcgatctggaaaacattattgtcgtcccatttagttacccctcttacagaaatgctgctggttttgtttttgagtgatgccctggtcttgaatgtctgctacctttaaatagttgaactgctgagcggtttgtaatggcgaaacatctatcatgtggagtaaaatcagtctttgataaaaaaaaaaaagggagaagtagaagaaaagagaaaaagaggaagaggggagtaaaagagaagaaaaaaaatgtgatagg

SEQ ID NO: 9969 - DNA, 449 bp, Triticum aestivum
  Clone ID: LIB31-017-Q1-E2-G4
ttcccgagtcgactcgaactcaatcactctcccgcttactacgccgtggccccgcatgctgtagtactcctacaaaccataccgccgcacgcatcatcagttttcttcaagaggacgagggagaagcggatttgtagtggaggcgctttaaaaaaaggatttgtagtggaggcccctaccctaaggtgccctaggtagctaccgcacacatcattggttttcttttttctttatactcttgcgccctagagtgaaatgatggttgcttcatccgtccaacttaatgcgggaaaggtggggctttgtgatttgacccctcatcgctcatttactactattgcggcgctacgaccggggtgcctccaagtccaaccgctgctccgaactataatttggtgcatcacgcgtggaacaagatggtggatgagccacatgttggccaaaggggt

SEQ ID NO: 9970 - DNA, 429 bp, Triticum aestivum
  Clone ID: LIB31-017-Q1-E2-G7
acggtccgaaattcccgggtcgacaaatcaactagaggagaggctaagggctgcttatgcggacaaacaacatgccgaatggcaggaagccgctggtcatcatgtatcgacacaaaccattaatgagaagaacaaactaccggatgcaaatatcaagcaagccgaagaactgaaggatttaagagcccaactatcggatgctttcaaggagaacaggaagctgagaggcagcatattcagtatgctctttaacctgactgtcacatggtctcctgtttgaaaatttgacaagtttacttctgtaggtgtgctaatcagacaccccgaaggagaagtgtctggattccaaggcgaccagctacaagagctatcaaaggtgcacgagcaagcacgaaaagcattgaggaacatggctaaacatttatggcc

SEQ ID NO: 9971 - DNA, 375 bp, Triticum aestivum
  Clone ID: LIB31-017-Q1-E2-G9
tgatgaatctgacaagaccagagaactctgtcggagagagaagattgagaaagttcctcactttagcttttataagagcatggagaaaatacacgaggaagaaggtattgaaccggaccagttaatgggagacgttctatactacggagacaaccactctgcggtggtgcagctgcacggccgacctgacgtggaaaagctgatcgacgagaatcgcactggaggcaagctgatcgtgcttgacgttggtctaaaacattgtggtccttgcgttaaagtgtatccgaccgtgctgaaactgtcccggtcaatgtccgagacagtcgtattcgctagaatgaacggtgacgagaacgatagttgtatggagtttct

SEQ ID NO: 9972 - DNA, 446 bp, Triticum aestivum
  Clone ID: LIB31-017-Q1-E2-H12
ttcccgggtcgacgagaaggacaggaatatcagagatctgaaggctaaggtggaaaaaaggaatatgtgggtcaacgggcttaccaagggctggggttcactggcagatgacctgctaggttctgcatatgatcaagctttgcttccgaccggtgcttcggtagttctacatttttatcatggctgaaaatgcattccaccgtgcactactcatcgatgatttgcacataagcttgaaaccaattaacaattgcatcgcctggaggcacgagggagtctgatgttacgagagcacatgaagacaaggcagctaatgtttctgttcaagatgtcaaccacatcttcatagcctgattctcgtgcctttcctgttgcgttctcccgttgcaacgcacgggcccttttgctagtataatctaaaaattagtatcggaggtttggaccac

SEQ ID NO: 9973 - DNA, 445 bp, Triticum aestivum
  Clone ID: LIB31-017-Q1-E2-H5
gtccggagattcccgggtcgaccgcatcccgccagcccaaacctgaggatgcccttttcaaggatcttgttgattttgccaagaagaatccatcttctccatctaaaccagccaacagccgcaggactcgctgagtgatgagtgtttcagtcatgtaacacacataattgagttgccaggctgctggttttgctacaggtcggcgaattagatatatcatcaaataagagggttcggtcggtctgttctttattgcctcagggaattatttggtctgcgcattggacaattagagtcacaggtgtcagatacgtagtcatgatactgggtgtggtgtgtagcgagttgcatttctcacctttttcttgtgtggtattggttaccgattcgtgctttattttacttagctgtatatatttctccatttgacggcagtattctattc

SEQ ID NO: 9974 - DNA, 448 bp, Triticum aestivum
  Clone ID: LIB31-017-Q1-E2-H6
ggtcctaaattcccgggtcgacttcctccaaaatgatagccaccatctcatcgaaagacaggacacctttgcctctatcaagtggtatcagttttcagattgcttggtgagattttccagtttttcatagctaagatcgagtctgttcttcatacctacagtccacgaaaaaagccaaaaaattagggttagttcatcatatccaaaccaatctgagcctttgcatagtctttttagagttttgctttgttgaatttgcggttgcatcatcatgtcgagttgctggtcttagcgtctagtcccttagagtttcgagttctgttcataggttgtcatgccgctgccgcaccatcgtcatcatcattgccatataccaccaccccagcctatacatcgccactgccatatacgaccaccaatccgagtccgcatataccatcgccatata

SEQ ID NO: 9975 - DNA, 460 bp, Triticum aestivum
  Clone ID: LIB31-017-Q1-E2-H7
ctgcagtaacggtccgaaattcccgggtcgacatcaaggaggttcctgacttcaacaccatgtacgagctgtatgatccgtcaacggtgatgttcttcttccgcaacaagcacatcatgattgatctcgggacgggaaacaacaacaagatcaactgggcaatgaaagacaagcaagagtttgttgacattgtggagactgtctacagaggagctcgtaaggggcgtggtctggtgattgctcccaaggattactccacaaaataccgttactgaggtatctgtgcctggctattcatgtgcagtgtgtggcctgctctgttccgtgatatgcgctgtgtgacccttgatgtaatgtctgtcaactttgaaagtgtcgtaactatgtatttgtatcttgaatatcaacatgtcataaacctgcaaccctttaaaacaagacctgctgtctattggtatta

SEQ ID NO: 9976 - DNA, 466 bp, Triticum aestivum
  Clone ID: LIB31-017-Q1-E2-H8
cctgccggtaccggtcctaaattcccgggtcgactaatttattcgtctatatggagatggagcagaaggtcagctatgtatgccaaggcagtgctaaaaacaataaaactacagcaatagcgacaaatgctctaaaaacagtaaacatgagacattaatacctgattagcggcagcagcatcatcgacatcgtcctcgtcatcagcattgaagtcagcatcatccttttcctctggattaacacgagaccacttctttgcaggtggaaccttgcgcttcacgccgcatttcttccccttaccagatgcaccagcaccaagtaaagaaggtgtagactcggcagtggcaagcacacgaggactacagcgtggcgtaccaccaaggcctaacccttcatcttcaacaacttctgcaggccttgaaatacgtgggctctttcgaggagtaacttcaccaactactagct

SEQ ID NO: 9977 - DNA, 451 bp, Triticum aestivum
  Clone ID: LIB31-018-Q1-E1-A2
attcacgggtcgacccccaacccgcagtcgctcatgttccatcctggaaagccggttatggaagttgggagctctgatttccctaatgctcggactgcgatgacatcacctttggcgaaggcactgtttgcgatcgaaggagttacaagagtattctttggatctgattttgtaactgtgacaaaatctgatgagacttcatgggactatcttaagcctgaggtctttgctgcgataatggatttctactcatctggacagccacttttcctggactcaaataccgcagctgctatggacacagcaattcatgaggatgattcagaaatagttgctatgataaaagaactgttggagacccgtattcgtccggctgttcaagatgatggtggtgacattgaataccgaggatttgagccagaaacaggaatagtgaagctaaaaatgcaag

SEQ ID NO: 9978 - DNA, 440 bp, Triticum aestivum
  Clone ID: LIB31-018-Q1-E1-A4
ttcacgggtcgacagcgtcgtcctctcaggcgcaggcgcagccggacttcgattacctgttcaagctcctcctcatcggcgactccggcgtcggcaagagcagtctcctcctccgattcacatccgactcattcgaggacctatccccaaccatcggcgtggacttcaaggtgaagatggttaacattgccggcaagaagctcaagctcgccgtctgggacaccgctggacaggaacggtttaggaccttgaccagctcttactacagaggggcacaagggatcatcatgggtatgtacgatgttactcgccgagaaacattcaccaatctctctgacatatgggccaaggaaattgacctgtattcgaccaaccaggactgtataaagatgcttgtcggaaacaaagtggacaaggaaagtgagagggctgtcaccaag

SEQ ID NO: 9979 - DNA, 433 bp, Triticum aestivum
  Clone ID: LIB31-018-Q1-E1-A8
ttcccgggtcgacgtcgtctcggagtctcggcgcgtcgcctgcggggagcaaggagccaaggtgcgagcgccgccgcagcgagctcgtccttccgaaggttagcagcatccgacagccatggcgaagcatcaccccgatctcatcatgtgccggaagcagcccggcatcgccatcggccgcctgtgtgagaagtgcgacggcaagtgcgtcatctgcgactcgtacgtgcgcccctgcaccctcgtccgtgtctgcgacgagtgcaactacggctcgttccaggggaggtgcgtcatctgcggaggggtcggcatctcggacgcctactactgcaaggagtgcacgcagcaggagaaggaccgcgacgggtgccccaagatcgtgaacctggggagcgccaagaccgacctcttctatgagcgcaagaaatac

SEQ ID NO: 9980 - DNA, 443 bp, Triticum aestivum
  Clone ID: LIB31-018-Q1-E1-B2
gtccaaaattcacgggtcgacacaaatgataagataccctctgacatgccttgctatcatgaccgtgcaagagtcaacacccttcctacttttaaccacatggtgggcccataacccacagttccacaggatcaaaacctgactctcctgtacagccctgttactaatggttatttcccacgcttggcttcatatttaattcacgggccaccttcctaatgctctattctggtatcagacgcaatacttactctcgttgctctgaaaccctttctcactccggttcagacttcgagaaactatctatccgcttggaacctcttattgtacctttgtaccttaccctcgacatattttattggttcaactcaagagatactcttatgctcattcatgggttaaccctagattgtctctctcataagcattctgtcgtagccgag

SEQ ID NO: 9981 - DNA, 436 bp, Triticum aestivum
  Clone ID: LIB31-018-Q1-E1-B3
tccaaaattcacgggtcgactttcactgtgaatatcaaactcatcatcgacttatagaacctgtgtacactcacaaacatatctgtcccttaacctataagtcttcaatacaccaaaattactaaggggcactaaatgcacttacactttcaccaccttcttaagtgtggagttgttgcctatctagtgaaccttcgtcatttgtttcactccatccctctggatgtatgcttcgtgtttcagctcgagagatgttttaatgactcaccccgtgagttgatcctgagttgtttgatcttcgaggagatcgatccttctagagttttccctttcctctcgttgtcatgttggttggagttctcggagcaagacatcgagacaaagatggtgatcgaatcaacgttcttatgaagtggacctggattgtgaagattgt

SEQ ID NO: 9982 - DNA, 430 bp, Triticum aestivum
  Clone ID: LIB31-018-Q1-E1-B5
actcccgggtcgacacttcacctgagcctcaagctcaggggcggtactatgatcaaggttaagactctcaccgggaaggagatcgaaatcgacattgagcccaccgacacgattgataggatcaaggagcgtgttgaggagaaagaaggcattcctcctgtgcagcaaaggctgatttatgctggtaagcagcttgcagatgacaagactgccaaggactacaacatcgaaggtggctcggtcctccatcttgtccttgctctgaggggtggttactagttaagctgtaatggaaacgcttgcgtcctgagagaagtgaccattggtggcatggaacctgtgttgcaaagagataataacaaactagctttgcttagtgggaggggctgtcttccatgttatctgcctatatgatttgacaaaactactc

SEQ ID NO: 9983 - DNA, 440 bp, Triticum aestivum
  Clone ID: LIB31-018-Q1-E1-B8
ttcccgggtcgaccggtccgtgcaactcttccgcgccgaccccatcaccactcgctattgtatgaagtaccggcactgcgacgggaagctcgtgctcaaggtcaccgacgaccgcgagtgcctgaagtttaggactgatcaagctcaggacgcaaagaagatggagaagcttaacaacatctttttcgctctcatgactcgtggacctgatgctgatataagcgaggtttcagggaaggaacaggcggagcagcagcaatcaaagaagggacggggcaggaggcagtagtatcatgttctgggtttctttcagaaagatcacaactgggagtggtgggtggatattttgatcgactcctgttagccatgttacaactgtgagtggtgggtggtctaagagtggtgagtagttttctaagacaatgtgcgccatcgttgga

SEQ ID NO: 9984 - DNA, 447 bp, Triticum aestivum
  Clone ID: LIB31-018-Q1-E1-C1
attcacgggtcgactcgacctacatgaaggaaaatgaggaacactatcctggagtgcaagacagttttgttgcttgtggagttgcagattttgttgggcagaagctcaccaactaaaatgatgaactcattatacaattctactccatggcacacttctatccagatggtaggatagtttggatgtctgaaggaacgagataccagtcaaccatagaggaatgggcgagtctgatcaatgccccagaggagagtgaagatgacttggacatttatgccaagaagaaaatggatcataactcaatgtcacacatgtacaaggagatccctgatgaagcacttgagattttcaagtttggatcagttcattttcttctgtcagggctgcctacaatcaactaggtcttaaggcacactcctttgcccaaatcaggtgatcacaacatga

SEQ ID NO: 9985 - DNA, 449 bp, Triticum aestivum
  Clone ID: LIB31-018-Q1-E1-C3
attcacgggtcgacttccaccaaagcgaaatccatcatctcatcgaaagacgggacacctttgcccctatcaagtggtatcagatttccaggttgctcggtgagattttacagtttttcgtagtttagatcgagtctgttcttcatacctacagtccacgaaaaagccacaaaaaaaaattagggttagttcatcatatccgaaccaatctgagcctttgcataatctttttagggttttgctttgttgaatttgcggttgcatcgtcgtttctagttgctggtcttagagtctagtcttttagagtttcgagttctggtcataagttgtcacgccgccgccgcaccatcatcatcacccctaccatctagcaccaccgcttatccgccaccgcttcgaatccgtatccatataccaccgccgctgtcatataccaccaccgctgccat

SEQ ID NO: 9986 - DNA, 443 bp, Triticum aestivum
  Clone ID: LIB31-018-Q1-E1-C6
ttcccgggtcgaccaagctagagcccatagtgacttgcggttgcacatgtaaacttttgggcatgaagtattcttccgtctctttgagtctgggtgaagctttccgcaagatgtcatggcacttctccatgcagcccggccatccactggttgctctagggtgcccatcaaatccatccttcagccagtagtgtgtactgaattcttgtcatcctatcttgaattctcgaggtcctgaagatgcagtccttgtcgatgccatcatggagttgttgtcattgaagtagagtcctccattctcacaccactcccgaacactcataccaaccccgtctactatagtgtagcatttaaaactaaacaatgtcccgggcttggtatagcacggtgatgggttcctacctcatgcatactactcaactacaaggattcaattcactact

SEQ ID NO: 9987 - DNA, 449 bp, Triticum aestivum
  Clone ID: LIB31-018-Q1-E1-C7
gtaaaggtccagaattcccgggtcgacaaatggatgcaggacagggcatttgggacgcgtgcgattggtgagctcaacctagagtttgtagatgaactccctgtactggcattggatgttgtggccatcatcggtggcattgtgtatttgtctatcttccagccatcgcttccaagtgcttcaggctggttcctatccttctgcattgagacaaaggagctgaagaaggtctgccctatcactcgctctgaaacttcctacccctacgtaatggcgtggcctcctgttctggtaggcaataaggtgaactctctcggctagaaggtgctcaactagtaagaggaagaagaacactagaactagaagtcggtcattttgtctgtactctgtatattaccttttgttatcagatgatggtatgttgctatggttctatgcatgttttcttg

SEQ ID NO: 9988 - DNA, 441 bp, Triticum aestivum
  Clone ID: LIB31-018-Q1-E1-C8
ttcccgggtcgactgccacgagcgcgatatctatcatctcatcgatagacgggacacctttgcctctatcaagtggtatcagatttctacgttgctcggtgagattttacagtttttcgtagtttagatcgagtctgttcttcatacctacaatccacgaaaagagccacagtggattagggttagttcatcatatccgaatcagtctgagccttcgcataatctttttacggttttgctttgttgaatttgcggttgcatcgtcgtgtccagttgctggtcttagagtcgagtcttttagaggttcgagttctggtcaaaagttgtcacgccgacgccggatgatcatcatcacacctgccatctaccaccagcgcttaacggccatggctccgaatccgtatccatgatacatcaccaatccgtgtcgatatacaccac

SEQ ID NO: 9989 - DNA, 445 bp, Triticum aestivum
  Clone ID: LIB31-018-Q1-E1-D7
ttcccgggtcgacacccaagcccaacattcgaagagttgtgtgtccagggtgtgcttgcaaccaagacaacaaaagagagatgggcttcgcagttgcatgtcggaatgcagttgtaattgggacaaaaaagatcaagccctccggttctgtctaaagagggtgtacttgtaattgagataaacatggatcgatctcggttgagtattaagtatggacttggccacgtagtagcttcgtttgcaccgttgtctaaaaaaaacttcatgtgcgccggtcaactgctgaaccaacaatcgttcatcaccagttgacttttaaaaataatggatctaaaaaatttgacaaattccaaaaaggttcatgattttgacaaaagattacgagtttgaacaaagttcatggaattcaaaaaaagttcctggattttcgaaaagagatcgcaaa

SEQ ID NO: 9990 - DNA, 446 bp, Triticum aestivum
  Clone ID: LIB31-018-Q1-E1-E4
attcacgggtcgaccaaaggtggctggtaagattatgcgccggacggatgtctatatctacgcctacagtcttctcatgcgtctttctcgaagatttttgtttttcgctgagctttttggtcacatttcgctgaggttgtcacacattaatgtaatacgctgggactactacaataactatgtatgccatttcctgctactttgatgtaaccactcaatgtctgcagtacattagtggcatagttatggttggatttgcgaaatggttcacggccgctctaaacgattaaactgcactgtccgttcatgtaacatcatgactcttcaatatggtcacttagactcaattcactggacgtctttttacaatgtcgtaagtgggacaatcctgtagttactcaactttactcacttgcagcagatccccctttccccatctgacatta

SEQ ID NO: 9991 - DNA, 443 bp, Triticum aestivum
  Clone ID: LIB31-018-Q1-E1-E5
cgcgttgtacatcgctacaccctatagtgagtcgtattacatctccctcctcgcctcgtccgagaagcccaacgtcctctattcggacattggaggatatgatatccaaaaacaagaaattcgggaggcagttgagctaccattgacacaccacgaattgtacaagcagattggtattgatccaccaagaggggtgctgctctatggtcctccaggcactggcaagaccatgcttgctaaagctgtggcacatcacactactgctgcttttatcagagtggttggttcagagtttgtgcagaagtacttgggtgagggcccaaggatggttcgagatgtattccgcttagctaaagagaatgccccggctataatattcattgatgaggttgatgctatagccactgctcgattcgatgcccagaccggggctgaccgagaag

SEQ ID NO: 9992 - DNA, 459 bp, Triticum aestivum
  Clone ID: LIB31-018-Q1-E1-E7
acaggtccagaattcccgggtcgacgagcctggcaacgctaggatggtgggctgtgacaaggagagcagtgatgatggcatgcaggaacttccactgcctgctaaacaaccaaaagaggaggcaccgtccgaaatgcaacttaattttagtgcaggtcaggaacaagctgatgactcaaaccatcaagaagcagcggcatcagtacgtgtagtcaacaagcctacgggcaacgacggcaccactgggatcgcaggctgggacgaggagagcagcgatgaggaagcgcttggctgcaatggcaaacaaccctgcggcaccaagaggaagggcccgttcaagaagaggtggaggaagcctgtgaaagcccggtcgctcaagtcactgatgatgtcgtagtgcctgactctcataggtttagtagttagctcagcttagtctgctccagttttggtgctgag

SEQ ID NO: 9993 - DNA, 443 bp, Triticum aestivum
  Clone ID: LIB31-018-Q1-E1-E8
tcgtgggccgacgctactccctaaagtgagtcgtagaagttcgcctacaccgcctaccaggtcaaggagtgcgtcgccgtcgggctcacctccgagttcgccgccgccgcgcaggccgccatgttgaagaaggccaactacgcctgccactactatgaggctaggctaccggccggccgccccagctggtggtcgtcggtggctaaataagtccatatatgcatgcacgtgtcgtgcatgttttcatgcagtttcccggatgcgcgcgcgcgtgtcctccgctatgcctttatgtgtttgcttgccgtttgatgatgcatgccatgccgtctcatatatacgtagtgatgcttaatgctttgcttgcttttcttatcttcgttggtgatgtaagaataatttgattgaagagttattagtgaaagacatagtatgcacaaaaa

SEQ ID NO: 9994 - DNA, 468 bp, Triticum aestivum
  unsure at all n locations
  Clone ID: LIB31-018-Q1-E1-F1
cgcctgcangtagcggtccgaaattcacgggtcgacaaaatcctcactgaagctgatctgtggaggttggcacttggcagggagctaaggagttgagaactctgcctctgaatgctcgtccaccccataacatctctagacaaccatagctttgtttaatcctccatttttaagagttttgtcctttttttctgtttctatggggtagtggagcttttgctgtgtttttggtcagtagtacagttaagccagttttggcatttttttctaatacagaagttagtacccaataatcatgttaaacagcataggacatcatattggaattacataatatagcatatagcctagctaatattcttgtttacgcgatttcttgagaacacttgggagttacgtgtcatgtctattatccattttggtaataccttgtgattgttagaaagtacatgatttttgatacataaa

SEQ ID NO: 9995 - DNA, 445 bp, Triticum aestivum
  Clone ID: LIB31-018-Q1-E1-F3
ctcactgttcaacacaacaccctatagtgagtcttattaaggaggcgggacggcctggttgctgctgctgcttggcggcggcggggacgaggcacaggagggaagaggaggcacggcctcgggcgctggttggaggaaatggatctgggaggatcccaaggggaagaggactggtggcggcggctgggaggatggaacaaggctcctaatatttacggtttggtctaaaaatggacaagggagtctatatatataaggaacaggggggtttggatcatctgatcgaaatcagacggtcgagataaatacgttaggtagcccaaataagaaaacggagatgttttatagatgtttggggatgatccggacccatcggtaacgacagcccgggtcgggtccggaaaaatttcggacacggcaagaaaggtcgtggttgtgtaaagag

SEQ ID NO: 9996 - DNA, 443 bp, Triticum aestivum
  Clone ID: LIB31-018-Q1-E1-F6
ttcccgggtcgacagtcggggtggcactcgggtgcatgctcgccttgacagtcatcaaggtcgcaatagagtcggtggaggctgtgctcggcgacgctgagagagagtctatcaagcataagtccatgctgttgtggctgaagcgacttatggatgccgacatgcttgaagattttgaagatgaaaccgacctcaacctggtatggattctgtcgatttggtcactatcaatgttgatatgaatgattttgtttaataacatattaatatttttagataatgaactacatctaaaacttttttttatgtagtgaagtagatctgaacctcgctgttggagttgatctttgagtcgatgttaagtaaaagttacatctacttgttgatgccaagaccgccatttcgttcctaaatgtccctgccttcttatgtttcaccaatag

SEQ ID NO: 9997 - DNA, 116 bp, Triticum aestivum
  Clone ID: LIB31-018-Q1-E1-F8
gacgcgttgtgcatcgctacaccctaaagtgagtcgtattaatcagcgcgacgggacacatttgcctctagcaagtggcatcagatttctaggatgctcggtgcaactttccactt

SEQ ID NO: 9998 - DNA, 449 bp, Triticum aestivum
  Clone ID: LIB31-018-Q1-E1-G1
attcacgggtcgacaaacatccttatgaggcgaaaaaaacctggagagactctgacggagtagcaaaggtgcccaaacatcaacgtttatacctgacacaataggcaaacaaatgaatgaaacggtgcagtcgtttgaacctcaaaacgcagtcatttcagaatctcaagactgatgccttcgaccagctcaagaccagcggaaggagttggatcaaaaaagtgctctttagtttgtggtcggcatacaccaccatgtgcaggatcacacaaggaaatctgttggagcaaaaccttgccctagctcttcctcgagtctacctctccctctctgtgtcacctcactctagcataaactgattagagaaagaagaaagtgaagagttcttttgagaagtcgtttgggaatattttcggttctgctaaaggaagagagaatatcttcacctt

SEQ ID NO: 9999 - DNA, 421 bp, Triticum aestivum
  Clone ID: LIB31-018-Q1-E1-G3
ctcattggtcgacgctacaccctatagtgagtcgtattaccctgtcacatgggccaccccaagactgagtgaagataaggttaggcaatgtgttgactcaagacttggaggggactatcctcctaaggctgttgcaaagtttgcagccgtcgcggcattgtgcgtccaatacgaagccgacttccggccaaacatgagcatcgccgtcaaggcgctccagcccctgctgaatgcgcgagcagcccaccctggggctgagcatgccggacgctaagctccactccttgtatgatataatagataaggaaaaatgagccatcaattgttgttcttgcggggcgcgtggcaggcggtttttgtacatttgtgattattcttcccaagttgtaaccctcgagattctagtaccagaaatatttga

SEQ ID NO: 10000 - DNA, 441 bp, Triticum aestivum
  Clone ID: LIB31-018-Q1-E1-G8
gggtcgacggtggtgtgatgccatcgtcgtcatgaagttatcctcggtggtgtgatgccgtccccaagatgagtcgctgtgacgccggcggcaagacatacatgaccaggtgcgttgccggtgcaagtggagatccatgccgcggtgacaggcgctgtgacggcgtcatccacagcgagatgccctgtgtggtcttggtgctgcgaaggcaaagttcatggcaagaggtttgcaggtgatctgcatcaagattagaggagttgacatgacaagattagggaggtgaatgttaggattaatcttgtctagccgagctgagagagtcagttagtttgttagctgcgtgagggtcgtgtgcctagagtgattctaggaggaagaagtggtcaagataagattagatgggtgcatgtgaagtggcgtgagtgggtcagtttgtta

SEQ ID NO: 10001 - DNA, 374 bp, Triticum aestivum
  Clone ID: LIB31-018-Q1-E1-H1
ttcacgggtcgacgtccagacgagagatagcggacaacgcatccctgcatgtcgaggctcgccgctaacatgtgggaccatgcttccatgatgcactgtgctaatttacacatttgcgtgtgatatatccagcctcttcaacacaacgtcaatcaatgcatatgtgactgcttgttactgacggtgacttcatgatatgttccggatacagaacgattgatcgatcattttatggatgatcatcagcctatttgtcatttcatctacgcatctacatgctggactcatgattctgatacatttagtaatttcgacgttcaggatcattcagttgtcatttacatcagccgcaccatcaatcattcgcccaatct

SEQ ID NO: 10002 - DNA, 441 bp, Triticum aestivum
  unsure at all n locations
  Clone ID: LIB31-018-Q1-E1-H3
ggtcgaccatgacaagataattatgcaacgtagggagtggaggagactgttcatgactcggtcatgacaagattattatgcaacgtagggagtggaggagaactagctgcatctccagtggaaagcaggcaatcccttacaattgaattaagatcatcttttttgtggggattattatgtaacgtanggagtggaggagactgttcatgagtcggtcatgacaaggttattatgcaatgtanggagtggaggagaactagctgcatctccagcggcaagcaggtaatccctttcaattgaattaagatcaaattaggaagaggaacggtccaggctctgatagatgcgccttatgtggggcagttgaaaacaccgagcacattttttttcattgctcgctggccaaatttctttggagttgtattagacattggcttcatg

SEQ ID NO: 10003 - DNA, 397 bp, Triticum aestivum
  Clone ID: LIB31-018-Q1-E1-H6
ccgggtcgactttaaaagttgtgagggttcaagtccctctatccccaaatcctcttttattccctaactatactatattattattatttatcctcttttttttctttttatcaatgggtttaagattcattagctttctcattctactctttcacaaaggaatgcgaagagaactcaatggatcttatcctattcattgaatagatttcttttttattagagtatcggcaagaagtcttggttattcactctatttttaagttttatttaagtaaaccatgcacaatgcataggactacccccccattttcaaattttaaatttgaaatactttaattaatttttagtccttttaattgacatagatacaaatactctactaggatgatgcacaaga

SEQ ID NO: 10004 - DNA, 399 bp, Triticum aestivum
  Clone ID: LIB31-029-Q1-E1-A11
tcacactctatagtgagtcgtattaagtaacgaatacattggtcagaatcaaatgccccgaaaaccaaaggtttcctccgaatggtatcacaactgacgcttattcagggcttaaaataaggctaaaaggcatatacgatggacaacaggtcaataatccggtcataccccttgttagtcacgcgggacagagaaggctacgttagcctacagatggttaagtgtttaaggacacaaggttaccctgcctcttaagggtagtaaggggttgcaaaaactcctcgagccgacgtcggaatatcaagcactgcatctctgaagtacgatatctatgccatagccccttgattgacttgacatacatttaacacaatggtgcatgtacctgacacctataca

SEQ ID NO: 10005 - DNA, 410 bp, Triticum aestivum
  Clone ID: LIB31-029-Q1-E1-A12
gccacaccctatagtgagtcgtattatccactgtccgccaaaactttgtctgacctaagtgcactatctagctatcataagttttcaaagaaattgatggcggcggctcagcaacatcatggcgaatggcaaagcttctaaaatggacgggagagaggtggtgacgcatggctgggagacgtacagatttgaggaaatatgacgcatgaggtttcatattaaaaaaatgatagcctttgtaagaaaagatatgacgtacatttgtgcaaattgataatgacatgcatgctatttctgaaaaaagaagcttctctgttggcatccctgatggtacctttagatacgcaggaagagaaatggtgtctcataattcattggatgtgaccagtaggtcatatcatcatgttttg

SEQ ID NO: 10006 - DNA, 419 bp, Triticum aestivum
  Clone ID: LIB31-029-Q1-E1-C12
tagtgagtcgtattaaacgcagcccacacttctctacaacaatgcagcccacatataaagaacaatgcagctcacttgaccataaagaagtggaaccaagcagtagactaaacataagataaagggaggataacaaagttcaataaaacaacctttatctgcaaaaaatagaagtgatgtgaaatcaaggcaacacttcctcgatgttagccaactatagagcatggcctttctgatgtagccaatgtgctccaccccaaacttagcaactcgaacaccatcccatgtctgcaagaattgaaacatatagaatccacaatcatgcctgcaataaaaagaataaaaactttagtttcacaaaaatgaacggaaaaaacttgaacagtatgccatagaacggttgtacagaacgcacccat

SEQ ID NO: 10007 - DNA, 428 bp, Triticum aestivum
  Clone ID: LIB31-029-Q1-E1-D10
gtcctcggtactccctatagtgagtctagtacactccgatgcagaaccatacacatggaggtttcactcgaagacctgctcccggggagcggataccgcagagccacccggacagtgtttaccagcctgtgcctcccctgaggatgccaccattcttgtgaagaaagaccatttctcccatcgctgtgtatatcgggaattatttgtttcgagagaggccgagtttagactgttgaagggtacccgaaatgatgccactggcgtgtgcttggtgtttttagggttctcttgccagcggacctggatttcattcaaatggctgtggtgacttatgagatcgcatatgttgcggtggtcggaattgtttgtaaacgtttgccgaaactgctgccgttggacatgattgtgatgccattactcattgccgc

SEQ ID NO: 10008 - DNA, 359 bp, Triticum aestivum
  Clone ID: LIB31-029-Q1-E1-E12
ctccctatagtgagtctattaatcggacgagctcccggaacgactgatcggtgcggttcgaatgtcgcacatagaactatcatctgcggttgttcctgtgcttgaggattaaccaaattactgctactatcgtccatttggtccaagtggtgcttgcaacgtcggcactcatctcctctatttcagtcttgacaagaaacagtagggtatacatatatacaggcagggaatcaagcgttggcaccgtgccatgccaacgacatactgaacgcggagacacaattaacttttatgtgtatgtaattatgtattgcacatcatgattcggctacgtgatggcaatctcctaagtgttagca

SEQ ID NO: 10009 - DNA, 455 bp, Triticum aestivum
  unsure at all n locations
  Clone ID: LIB31-029-Q1-E1-F10
tgacggtccgaaattcacgggtcgaccctcaggtatgctacctcttttcgaaccatacccttgttctattgcccccatctgccacgtcgctgcatgtggatctttttccactccaccatctccccaatttgctatcctctgctttgctggtcacccagacgaaaaccttaatttgcactattaaaggaaaccctacttcatgcagactaatccatgtctgggataataaggaaagtaaggaagaaagtattgtcgaagagactaggtatcgaacccgcatctaggttgaaaaggggaaaatcagtagctaaggaacgagtctcgtgtctcttgtttttttttgacatggtcgtgtctcttggttgaaaagggtagaaagacatgaaaatgcaatagagaatgaacaggtcaatcagtttgttttcctcacatangaaaaaggtggctaaagagaa

SEQ ID NO: 10010 - DNA, 328 bp, Triticum aestivum
  Clone ID: LIB31-029-Q1-E1-F11
actcgtagtacaacataacaccctatagtgagtcgtactagccgccgtgaagaagatgtacgacatccaggccaagaaggttaacaccctgatcaggcctgatggcaagaacaaggcgtacgtgaacctgacaccaaactacgatgctcttgacgtggccaacaagatctgcatcactataaatcaagatggactgtcctgcactaggcgcctgtgtcctggtctcctatgttactggaattatgtaattgctacttagcaaaggggcacaatggctccattgcctaccatatcgccgcacaatttcatgaacttgatgcaatctcaa

SEQ ID NO: 10011 - DNA, 381 bp, Triticum aestivum
  Clone ID: LIB31-029-Q1-E1-F12
atagtgagtcgtatacacgtctaatctgattctgattttcatgttagttggggtgcattgtatcatcgctcggtcccaatgtaactctgagatcttttgacaaaaaaggtatatttgaacctaataacacgcaatatacggctgtctcagcaagagcaactcgagcgggctgagagcaggaaaaaatctattttaaaccctgaactcatagacgttcagcatatcaaaccctcaagtccaaatccacgtcgtttgcacctgaactatgcaatctcggtttaattcgaaacctggcatcttttgaggaatgaaaacgctgacgtggccatgtcaatcgggattcgtctgactggtgcaccattgagcggcatcagtgatcac

SEQ ID NO: 10012 - DNA, 453 bp, Triticum aestivum
  unsure at all n locations
  Clone ID: LIB31-029-Q1-E1-G11
ggtccgaaattcacgggtcgacgataaaccaacacataccatatcattaaaggcgtcagcgtgttgtgccaaaaggaaacctcaaggtatatggagaaatagccaaaattgaatacacgtgtacctcaggccacttcctcgaggagtaaaaaatagagcataaatattgcaagattttcaaaggatangaacaacgctaatttatagtggtggaatacagatggtgcactgccgagccacccatgtgtcatatatttgttttatgtgcttttctatgatatcatcgagcgtacaaacaagctcgtgggaaaaaaatgatggcatcatccaccacgtcgaaaacaatacggaggcataaaactaagtgtgcatcatagtacgccaccaaccttaagtcgagtgtgacaaataagtaaatcaaagctcttaccatgtgtacacttcaaatgacaa

SEQ ID NO: 10013 - DNA, 444 bp, Triticum aestivum
  Clone ID: LIB31-029-Q1-E1-G12
actcattggtcgacgctataccctatagtgagtcgtattatcactggctttccttttgtgtgcgtctcgattggcctcaccattgggaagattcccaccgttggagttgtgtacaaccccatcatgaatgagcttttcacagctgttcgtggaaaaggtgcttttctcaatggttctccaattaaaacatcgcctcaaaatgagttggtgaaggctcttatggtgacagaggtagggaccaaaagagacaagtccactttggatgatacaaccaacagaattaataagttactattcaagattagatctatacgtatgtgtggctctttggctctaaacatgtgtggagttgcttgtggtaggctagatttgtgttatgagatcggttttggtggcccctgggatgtggctgctggagctttgattctaaaagaagctgggggg

SEQ ID NO: 10014 - DNA, 409 bp, Triticum aestivum
  Clone ID: LIB31-029-Q1-E1-H11
caccggtccgagactcacggggtcacgccgatgaatacactgtatcggagcacaacctcctctctgttgcatacaagaatgtgattggagcccgccgtgcctcatggcgcatcatctcctccattgaacagaaggaggagagccgtggcaacgaggaccgggtcacactcatcaaggaataccgtggcaagatcgaaactgagcttatcaagatctgtgatggcatcctcaagctgctcgaaacccaccttgtcccgtcttccactgcccctgagtccaaggtcttttatcttaagatgaagggtgactactacaggtatcttgccgaattcaagagtgggcctgagaggaaggatgctgctgacaataccatggtggcatacacggctgctcaggatattgctttggc

SEQ ID NO: 10015 - DNA, 414 bp, Triticum aestivum
  Clone ID: LIB31-029-Q1-E1-H12
ccctcgccactcatatagtgagtcgtattagcacggatttgtaagcgtgctcgagcttcttgctgagatcatagtcttgcaggatgtcgatgatcccgaagaagaggatcacgtcctggaattcgcccgtgggctcgccgatgagcagggattcactttcaggatttctcactatgtgctccacccttgagggcatgctaattcctagtttttgttgtgcttatctgcagcaaccatgtcagtgtttgtcagtatcaacatgaacgcaattcaaaagttgccggcatgaagtgagcaacctaagctgagtaaacgaaaaatgtaatgcaaagcatcttatgattcttcaaagcttctaaaatgtatggtgtagataccttttttgcgcagaatcttcatccgtggtagtaagtg

SEQ ID NO: 10016 - DNA, 439 bp, Triticum aestivum
  Clone ID: LIB31-030-Q1-E1-A10
ctcacgggtcgacatcatcctctatagtcagtcacataacacctgtcgagtccgctgtgctgtggatctcacgtacaatcgagactgggcggcctgcgtcgcgtctgttcataccacctgcacagtgcagcgactcaactgccagtctggcatcacgatcgcacacgagaggacgacgacgaagaatacggccatgggagcttgcgatactttgaaacggtccaagtcttgggcgatgctcacatgtcgtgcccactgtggcctcaatggtcagtgccatgagtgatgatgatgatgagcgccttttggtcgcaggagaagcatcacctgcaagatgttagtgagaacatctccaacaggcgtgcaacatgcggcgcgcaactcattccttctttgggagggtctacaagctgacgctctaaacgatgcacacttacgt

SEQ ID NO: 10017 - DNA, 341 bp, Triticum aestivum
  unsure at all n locations
  Clone ID: LIB31-030-Q1-E1-A9
taccggtccaaaattcccgggtcgacaatgatgagccggcaaaaggcaacaacaacaaacggagaaaatccggggaagccaagttaacaaggcaacaaaaattccaagaaaccaaaacaaggggaataacaaggtaaattcaaagtaaagttaaggggaattatccggcaaacaaaatgcctaatgaggacaatcattttgatgaccccttagcagcgagtagtgagaacttacctaatgaagaagctattcagttcacggagcagcatggtagcagaagaaagtcaacctcaaagggtggaacaaaacatgtgcccacangaatatcagagaaaggtgcc

SEQ ID NO: 10018 - DNA, 455 bp, Triticum aestivum
  Clone ID: LIB31-030-Q1-E1-B10
attcacgggtcgacgaacatgccaaaagagcacacgatttgaggatatcacgagatatgatggtgaacgagctccttatacgaggactcagatgaagaagccttcggcaagtagatctggaatggcatcaatagactatgatcttgatgctgacttctctcaccgcaagtccgggcatagttgatctaggcagcatgcttctatggcataagcagcacctttggactttgtcattcgtcgatagtccaaaattgaccccgaatagatactggctcgtgctaagcaacaagttcaagaccagcgccggctgacgatgagctagaaactgcagtagctgaaaacgccgaataagaaaaacctccaagcttcgaagcttattgttgaacggcgtgggatggtcaaatacctgtaagctagacacccccgacagccttgcgatgcatatgattgtgtgc

SEQ ID NO: 10019 - DNA, 400 bp, Triticum aestivum
  Clone ID: LIB31-030-Q1-E1-C11
gccataccctaaagtgaatcgtattagggcagcactggggaccggcaagtcgcgagttcttacctcgaacgcgtcattctggcaaaccatgataaggataacttcctcgtgccttactttcccgagtaagtcctcccctcaaccgccccgtatcatatgaattcttagatttcgatcgtttttctttaaacattctgtgttttctgaagtgacacacattgcacgctcaacctcctaagccccaaatattccatggccacgtatttcgaaccggaccgccaatcaaacgttgactactcaaatgtcaacaaggttcttgatgatgttctccacggctacgtcaaatctggaggcaccttcaccaggcctattcgtacgtacggcaagcatgtgttctccc

SEQ ID NO: 10020 - DNA, 444 bp, Triticum aestivum
  unsure at all n locations
  Clone ID: LIB31-030-Q1-E1-D11
ggtcgacgacgctgagaaaatgggacctgactacatggatgttgaaagtctcaagaagatgaacaagaacaagaagcttgttaagaagctagccaagaagtaccatgctttcttggcatcagaggccataatcaagcagatccctcgtctccttggccctggtcttaacaaggcaggcaagtttcccactctggttagtcaccaggaatctcttgaagccaaggtcaacgagacaaaagctacagtcaagttccagctaaagaaggttctttgcatgggtgttgctgtaggcaacttgtcgatggacgagaagcagatccaacaaaacatccaaatgagcgtcaacttccttgtgtcnctcctgaagaagaattggcagaatgtgaggtgcctgtacgtgaagagcacatggggaaacgtgtacgtgtgttctaagtgtgtgcg

SEQ ID NO: 10021 - DNA, 452 bp, Triticum aestivum
  Clone ID: LIB31-030-Q1-E1-D12
cacgggtcgacattgacgggaaggacattgcatcaactccggattcaaagcaggctacggaatcttcgaaacttcctgtggaaactgctgctgcatccactgcggtgccccctcatgcagacgtgtaccatttaggcagccagtcacagcgttccgccttggctagccaaaggtccgggcagctacagaggccaatccagaaatggaaaggccccgacaagatcagcaggatctatggtgattggatagacgaaactgactaggaagaggagcgccgtgtctgtctcctttacccagtttagttctagttggcattgcaaaaacctagtgctggaagagtctgcgtgttgtaagactaaaacattatgctgccgcaacttgtattgtgtctgttgtatgctgattgcagtgaactcgccgctgggagagctgtatggatggtagtgttctgg

SEQ ID NO: 10022 - DNA, 354 bp, Triticum aestivum
  unsure at all n locations
  Clone ID: LIB31-031-Q1-E1-A10
acgcctgccggtactggtccgacattcncgggtcgaccggaatcgtcgttgtccctggatctggatttggccaggttcctggcacatggcacttcaggtgcacgatccttccgcaggaggagaagatcccggcgatcatctcccgcttcacggtgttccatgagacgttcatggcagagtaccgtgactaaactggtgtaacatgtgtgggattacatgcaagcctcgtggattttccctaggcgtttttgcccccgttgacagcagtatcatgtagacgagacaaaataaagcaaatccatggcttgtgtgtgtgatatactatatcagattccgaaacagatttacagtcag

SEQ ID NO: 10023 - DNA, 429 bp, Triticum aestivum
  Clone ID: LIB31-031-Q1-E1-A8
tccagaattcccgggtcgacggagagcgcggacacgaagatggacgcgtggctggacgttgacatgaggattgctagccactcccggggcccctcctggtatttcttcttccaatattttttaataattttaaaataaatctccataaatttttaggtcatttggagcttttcggagaatagctatctcaagtgtaactcttttcaggtcgagaattccagctgacggcaattttcctctccatataaatcttgcataataagagagaaaagacattaaaattgcatcataaagtgaaatattgacccaaaacattataaatatcagtaggaaaacatgatgcaatatggccgtatcaccgttggtgtaccggagcataaggctttcgcctgaatccattcacgcaccacactgaggaagctcgaacac

SEQ ID NO: 10024 - DNA, 441 bp, Triticum aestivum
  Clone ID: LIB31-031-Q1-E1-B7
tcgcgggtcgacatgacaccctatcgtgagtcgtatgaggtcggagagttccgacctatgatatttgcggaagtacctaatgttactagttttagaggggtggtagtatatgttcatggattttaccctcatgcggggggaacagttgtccgacctgggagatttcctggccacattaatggtgtttaccaactgggtgattttacataccttgacggagacttcacatctgagtctggaacgtctggtggaccagttaccatgggagatagagttattggagtaaatgtgcaaagtgtgggaggatcgagatgcgcggtttcccctctgacactatacatgacatttatgaattggtgtggttttaatggcggataccatacaattgctgcgatgatacaacgccttgctgcctaatcagttttgcaatgtcaagcatca

SEQ ID NO: 10025 - DNA, 473 bp, Triticum aestivum
  Clone ID: LIB31-031-Q1-E1-B8
gtaccggtccagaattcccgggtcgacttgatgatgtcaattgctcaaggactgattttggcgtccctgccccgaatatctcaattgctgcatggcactccaaaaatcttgtgcaagtcgtctggggtaaacactatttcctggttggcggttgctgtcgatgacgattgtaagcatgccgtcagtgtatctcgtttgaccatacaaggccgacgagcgcaaggatgcccacacactcatcttgacaaccatccatgtaatcggcatgcacagggcgcctgaaagtccacttgctttgaccatggatgcacaacccaaaattttggtctgcaccagtggcagtagcagcagagaaaacatgatttagtgcaacggaagttcatttcataatgatccgtccaaattacatcagccaaactcttacgacttaatcaacggacgcgcgcgcataacacgtgatcgtccctcgtcag

SEQ ID NO: 10026 - DNA, 408 bp, Triticum aestivum
  unsure at all n locations
  Clone ID: LIB31-031-Q1-E1-C11
acgcctgccggtattggtccgagcattcncgggtcgacaggctgaacgtcattgaccacatcaaggctgtcaaggactcgctcgacctctgtgccgccgtcgaggatgtccagatgctggcgtttcatgtttcgtcacgagcatcaagatgaagaagtcggaagaagcatagtccaagctcatcggagctagttcaaggagtaatgaagcccttgatgctgatccgtattggaacaaattgaagcacgaactgtgacatatagagcttgttatactgtagagcttgatgctcatcggctcatgtgacatattgtacatctgtagagcttgttatattgtgatcgcatttgtatgtgctgatgtaacagattgttgcttcttgttatttgaagtattacacctgtttac

SEQ ID NO: 10027 - DNA, 448 bp, Triticum aestivum
  Clone ID: LIB31-031-Q1-E1-C6
aattcccgggtcgacatcttcctggaccacctggccaccatccccatcactggcaccggcattaacccagcgaggagccttggcgctgccatcatctacaacaaggaccatgcctggaatgaccattggatcttctgggtgggccctttcgtcggcgctgccctggcggccgtctaccaccaggtgatcatcagagcgattcccttcaacaagagcaggtcctaagccgcctcgcctccgctaccaaaagctgatcgggaataacgagcttctttgtgatgtcttgtttcgagcgcctagtaccgcatccgccgtcgattctcctgaagatgttctctcctgactgaatccagacttacgtgtgttaagactccagtgtgagtgtgtgacagttgtgtgtgctctcattgtggaagatttaagttataatttgttgatgtggcttccc

SEQ ID NO: 10028 - DNA, 464 bp, Triticum aestivum
  Clone ID: LIB31-031-Q1-E1-C8
gtacaggtccagaattcccgggtcgacatcgagccagatgcgcatgtcaagcaggcgatgaatgagatcaatgcagctgcaaggatgagggtggctgcaaacgagaaggcggaggctgagaagattgtccagatcaagcgtgccgagggtgaagcagaggccaagtacctgtctggcctcggtatcgcccgccagcgccaggccattgtggatggcctgagggacagcgtcctgggcttctcagtcaatgtgcctggcaccactgcaaaggatgtgatggacatggtgctgatcacccagtacttcgatactatgaaagagattggcgcgtcctccaagtcctcggcggtgttcatcccccatggccctggtgcggtgcgcgacatcgccacgcagatccgtgacggtcttcttcaaggccagtctgcctctgacaactagcagtttgcttcgccggcatgaac

SEQ ID NO: 10029 - DNA, 463 bp, Triticum aestivum
  Clone ID: LIB31-031-Q1-E1-D5
ggtccagaattcccgggtcgacctgctggtggaggtgctggcggttgcacgtagctttggttttgatcaacctcatcctcataatcgcccgcatactcattatcctcctgggtaccagcagcagcagtagcaggagccaaagaagcatcaacaacagggatagcagcaccagaagtttggccaccctcaagaggaacacgcttcgctcgtccatactgattcgaaaggggcgttgttgttgttgttgcagcaatgcgataggtgcagccggcggtggttgtggaaaatgcgcgagcaattcattgaacttgctatcaagctatgtttcgaacgtcttctcaatgccatctatcttctccatggcctcgtcaaatctatttagcacatcttgcacctgtccactcatcatttgctaaaatttatcatgtagttgtttgttcgtcaggttctcccaatcaatctc

SEQ ID NO: 10030 - DNA, 375 bp, Triticum aestivum
  Clone ID: LIB31-031-Q1-E1-D6
gtccagcattcccgggtcgacaaggcacagcagatcgaggatgtgaggaaagccctctacgcctccaagatctgcagctacgcccagggcatgaacatcatcaaggccaagagcacggagaagggatggggcctcaacctcggcgagctggccaggatctggaagggcgggtgcatcatccgcgccagcttcctcgaccgcatcaagaaggcctatgacaggaacggtgagctcgccaacctcctcatcgaccccgagttcgcgcaggagatcatggacaggcaagccgcatggaggagggtcgtctgcctctccatcaacaacggcgtcagcacccctggcatgtccgcgagtctggcctactttgactcctac

SEQ ID NO: 10031 - DNA, 437 bp, Triticum aestivum
  Clone ID: LIB31-031-Q1-E1-E3
cacacgctatactgagtcgtattacgcgacggtcatcaccgatgatggtctcaaccgacaattactcccgcaaggcgtagccccttgcacaccctgagaagctactggtcgtcgagaagtccgagccgagcgcgatccatgctaccccaacaacaactcctccaacgccgtcaagaccgacgaggcacgacggcgagggcaagcgcggccaccgcaaaggccacgctacttgcggcgcgtgtaccgacgaggacacgggctctgccgccgcccacacacacacatcgccatcatcatgcatggagaacgtgaagcgaagacgacgaaaacgaccacacaactcaatcgaaggtatcctgcggagcaacccgcgggagtaattaaccgggagccttccgaagccccgggaaccaggagatcacacaatcgccacagtc

SEQ ID NO: 10032 - DNA, 430 bp, Triticum aestivum
  Clone ID: LIB31-031-Q1-E1-E5
ggaactctatagtgagtcgtgctacagtttccgttgggggatgatgaaaccatgtgtggctactcgatgcctaatctcacagaattctcttgatgaacgctctcctagtgtcagtactgctgtatcttgtggatgctaacaacgattttcagtacatggtactgttgtccgggtcgaggaaggtttacgcccagcggacctagatgtgctggatgttttagactgtagaagacgacgcatcgcgtgctgaatgaatgttgctgagactctagtatcgcagtgtgttgacgacgccgacttgcttgggctcccgttgttaaatttgctacgctacctattgatagagatggttttcttgttgaatttggatcttgctggggttgtaatttcatcatgagaggaaatatctgcatcagttttttgctagtag

SEQ ID NO: 10033 - DNA, 429 bp, Triticum aestivum
  Clone ID: LIB31-031-Q1-E1-E8
ctcccgggtcgacatcaaaccatatgcgcatgccaagcaagcgatgaatgagatcaatgcagctgcaaggatgagggtggctgcaaacgagaaggcggaggctgagaagattgtccagatcaagcgtgccgagggtgaagcagaggccaagtacctgtctggcctcggtatcgcccgccagcgccaggccattgtggatggcctgagggacagcgtcctgggcttctcagtcaatgtgcctggcaccactgcaaaggacgtgatggacatggtgctgatcacccagtactttgatactatgaaagagattggcgcgtcctccaagtcctctgcggtgttcatctcccatggccctggtgcggtgcgcgacatcgccacgcagatccgtgacggtcttcttcaaggccagtctgcctctgacaactagta

SEQ ID NO: 10034 - DNA, 448 bp, Triticum aestivum
  Clone ID: LIB31-031-Q1-E1-F5
ttcccgggtcgacgaggccttccaagctaagtatgatgtgaagccgaacaatgccattcttgccgaggacaagcacttgcccatgtacgatgagttgtccagcaaggacaatgttgaatatattgctggaggagccacgcagaactctatcagggttacccaatggatgcttcaaactcctggtgcaacaagttacatgggttgcattggaaaggacaagtatggtgaggagatgaagagcgccgctaaagctgcaggagttactgctcattactatgaggatgaggctgctcctacaggcacatgtgctgtctgtgttgttggtggcgaaaggtcattgattgcaaacttatctgctgcgaactgctacaaatctgagcatctaaagaggccagagaactgggcactagttgagaaagcgaaatacatctacattgctggctttttc

SEQ ID NO: 10035 - DNA, 448 bp, Triticum aestivum
  Clone ID: LIB31-031-Q1-E1-F7
ggtccagaattcccgggtcgacgagcggccgtattttttttttttttattttttttttggaaagcatatgcccttaacccacaaacaattgtaacaaatttggtcttagattcagtcgtcaacttccaaacccatgcaacaaaacatatcagatccatactcaattctatagcaacaatagtttaggcggagtacaatccaagcaaaaagtgtttaaattctagcttcacgggattcctgatggggcaaaatccagacctagttggccgaggccctgttcctgggggcagcctcggtaccttctctgaagttgctcttgaacctgcgaggcaggtggcgcatgtacctcatccttccagtgccagtggtcttgcgcctgatggccttcacactccagttgtacttgcggatgcgggcggcggggtagccgcaggaggagcaggtgctc

SEQ ID NO: 10036 - DNA, 377 bp, Triticum aestivum
  Clone ID: LIB31-031-Q1-E1-G10
ttcccgggtcaacgagattgtcatactggggcctgtaattctacacaatatgttcccctttgagaggttcatgggactcctaaagaaatatgtccgtaatcgcgctaagccagaaggaagcatctccatgggccatcaaacagaggatgttatcgggttttgtgtttacttcaatcctggccttaacaagatatgtctccctaaatcgcggtatgaagggagactgactggaaaaggcactcctggaagagactcaataatatgcagggacggatattcttggtctcaagcacactacacagttctacaaaactctaccttggtgaccccgtatgtcgatgaacacaagaacagtctacgctccaaacacccggagc

SEQ ID NO: 10037 - DNA, 237 bp, Triticum aestivum
  Clone ID: LIB31-031-Q1-E1-G5
gtacaggtccagaattcccgggtcgacaagagtgtggacttcgaccgctccagcgctcccaaggatttccaggtcagcgggtggtaccaaggagcagacgacgattcagacaagcaaacaagcacggcggcaagcctaagggagttcaacttagaactccaaaagagcaacggccaaaccttccaactagacaggaacaacggcgacgcaactgtgggcaacaatggccgggtcgaa

SEQ ID NO: 10038 - DNA, 448 bp, Triticum aestivum
  Clone ID: LIB31-031-Q1-E1-G6
ttcccgggtcgacggcggagcagaatccatcgacggcggcagaatccaacggtgggaggtcactggtggcgagaagatgattcggagacccgaggaggcagagcaggatacccgcgggctgaggggatttgaagtaatttccaaaatctcacccgtgggtatttatatcccgaccctgtcagtgtgaccgagtggaacaactcggtggcaccgagattgcagaatcgcaagtggttgctgcaactcggtgtgaccgaagtgttcaaatcggttggaccaatatgtaaacctagatcaacttagtgatcttggtttgaccgaaatggatgtctcggtcagaccaaaatgcacaaagaggttttggaagtttaagtctatgatgaatcggggactctgagtgctcctcacacagagtggttcaaatctgacttgatcaaactttgtgatg

SEQ ID NO: 10039 - DNA, 453 bp, Triticum aestivum
  Clone ID: LIB31-031-Q1-E1-G8
cccgggtcgacaacaaagataaagccctgagtgttctggaagtagtgcctccacaaaggccttatctgttttgaaaatggcatacataaatcatcagcttttctttacataaatagacttttgtcaatgaaacactttagtaactgcaaacaggtgattagcattttattcatgtgacgacaaaaaaggaaataacagccaaagagtaaaccaagaagaaaaaaatagcaaaatcctaaccttgtcctggccaccaacatcccaaacagtgaagctgatgttcttatactctactgtctccacgttgaacccgatggtggggatggtggtgacgatctcgccgagcttgagcttgtacaggatggtggtcttcccggcggcgtcgaggccgaccatcaggatccgcatctccttcttggcgaacagcgccccgaacagcgtcccgaacgacag

SEQ ID NO: 10040 - DNA, 390 bp, Triticum aestivum
  Clone ID: LIB31-031-Q1-E1-G9
tattggtccggacttcccggggccacggagaagaagcaattgaacacgatgcgggagatcaaggtgcagaagctcgtcctcaacatctccgtcggcgagagcggcgatcgcctcactcgagctgccaaggtgttggagcagctgagcgggcagtcgccagttttctccaaggcgaggtacactgtcaggtctttcggcattcgtcgtaatgagaagattgcctgctatgtgacgatcaggggtgagaaggcaatgcagcttctcgagagtgggctgaaggtgaaggagtacgagctcttgaggaggaacttcagtgacactggttgctttgggtttggtattcaggagcacattgatcttggcatgaagtatgacccatcaaccggcatc

SEQ ID NO: 10041 - DNA, 471 bp, Triticum aestivum
  Clone ID: LIB31-031-Q1-E1-H5
gtacaggtccagaattcccgggtcgacaagcgatagtgagcgagcagttcttggcgacgttggcgacgcacccgacgaagttgacggtgaccaagttgtacaccccaaacgggccgagattcaccttcaagaactccgccggcggcgaggccatgctggaggtggagtcccgcatgggcttcatgagcctacgctcacaccaattcctcgacgccacatcagcccaaccggtgatccatctccaggagaccggccttgaggagcgtaagtgggaggcgtacaggggcaacagcacgagagaaagcgacaagatcttcgacgccgtgaacaagtcatggtatttcttcctgatggggaccaagatcgaagtgttcctccgcaagtcctccgacgagccgaaaccagcaggcgtcctcgtcgatggcaactcctccggcggcatgcagaaaccagcagacttcgtcgtccttg

SEQ ID NO: 10042 - DNA, 446 bp, Triticum aestivum
  Clone ID: LIB31-031-Q1-E1-H7
aattcccgggtcgacatcggaaggaaagtcatccatggaagcgactcagttgagagtgccaggaaggagatcgccctgtggttccctgaaggcattgcagaatggaggagcagccaacaaaactggatttatgaagcccaagaagtgtcatgagtggtttgagtgcaggtttcattaagcatctaccaaactagtctttggttgtttacagttttgagatttgtatcttgggaaccttgtttgtgtgaactgaagatatctccttgtgcttgagcatgcaagcgttatctgctgctccatatttgatatatggtaatgagttgcatttcatgttttaaaaagaaaaacagcgacggattgggcaagcgagtccggcaagaaacacaaatcccaggggagataaggccaaaaaaaaaaaagcggccgccctaaagggatcaagctta

SEQ ID NO: 10043 - DNA, 443 bp, Triticum aestivum
  Clone ID: LIB31-032-Q1-E1-A11
attcccgggtcgacgctccatttggtcctgaggcttaggggtggaactatgatcaaggtgaagacacttactgggaaggaaattgagattgatattgagcccactgacacaatcgacagaatcaaggaacgtgttgaggagaaagagggtattccacctgttcaacagaggctcatctatgctgggaagcaactcgctgatgacaaaactgctaaggactacaacatcgaaggtggttcagtgctccatcttgtgcttgctctgaggggcggtcagtagatgcaacctcgacgtggaccgtaaaggccatttctaccagaacttgtttgcagacctagatctgtgaatttgccggttgattgaagtgccatgtaattgacgcatttgtgaagtcagctgtcacctgtacttggatggaattgtttgaactatatgcttgtccg

SEQ ID NO: 10044 - DNA, 449 bp, Triticum aestivum
  Clone ID: LIB31-032-Q1-E1-B10
gtaccagtccagaattcccgggtcgacagtccagtgcgctaatgggtgctcctatgctggtttcgtgctgtgacagagaagtcagagctgcggtcagcgacgccattgcggcaacgatgactccatgagggtggttttcagcgggcggtgctctccgggtgttgcgttggactaggtcggtgcgaggcgtgcaactttctcatgtgaagctcttcagcaaaatcggagctgtcaagtcctcgacgcttcggtcgattgtttggcgtttgtggccaggtcgtctgtgtgtgccccgtgggggttgtaatctaggttttcacccggttttccgctaattaaccgggcaactctcttctgcttaatcaatgaaaatggcaaatcttttgcctcgttccaaaaaaagaagtaagaacaaaaaaaaaaaagcggccgctctagaggatccaagc

SEQ ID NO: 10045 - DNA, 447 bp, Triticum aestivum
  Clone ID: LIB31-032-Q1-E1-B11
attcccgggtcgacaaatgaaacacgtaatacatcaaaaaggataacatgatataattcacatatatggcgattggctaaacaacatgacatttcataattcacatatataatgcatttataaaaaattgaatatatcatttgaaatatgttaaaaaatatatttgaaaaaatgtcagtcaagcaattgaaaaatattaaaatgttattaaaaatgctattcttttatttgaaaaaaattaatgaagcatttcaaaatattaaaaatatctatagaaaaaaggttgaccatgcattaactttttttatcttgtatatgagaaatgttgataaaacatttgaaaaatgtttaaatgtatatgagaaatgttgattaaatgtgaaaattttaaaaatatctactgaaaaaaggttgaccaagtattataattgttaaacttgtatgtga

SEQ ID NO: 10046 - DNA, 434 bp, Triticum aestivum
  Clone ID: LIB31-032-Q1-E1-B9
attcccgggtcgacccgctccgggagttcgccaaggacagcgttcgcctcgtcaagcgctgccacaagcccgaccgaaaggagttcaccaaggtggccattcggacggccatcgggttcgtcgtcatgggcttcgtcgggttcttcgtcaagctcatcttcatccccatcaacaacatcatcgtcgggtccggctgatctcgtctccgcaggtgaggggccgcaggacgagaggatggtgtccattcatggaggcggcgctggttttcttatcctcgtaccttaaagcaattcatttaggacttcattgtagaggacagttcccttgtgttttcatttgaaacagttgtattggtagacctggagcagttttgaacctgattccggctaggccgtaatatcaagcagtgaatgacaagaattgaaaccctaaca

SEQ ID NO: 10047 - DNA, 441 bp, Triticum aestivum
  Clone ID: LIB31-032-Q1-E1-C9
ttcccgggtcgaccatacattaccgagggggcagcagagccttgtcacatgggccaccccaagactgagtgaagataaggttaggcaatgtgttgactctagacttggaggggactatcctcctaaggctgttgcaaagtttgcagccgtcgcggcattgtgcgtccaatatgaagccgacttccggccaaacatgagcatcgtcgtcaaggcgctccagcccctgctgaatgcgcgagcagcccaccccggggctgagcatgccggacgctaagcaccactccggccttttgtatgatatagataaggaaaaatgagccatcaattgttgttcttgcggggcgcgtggcaagcggtttttgtacatttgtgattattcttcccaagttgtaaccctcgagattctagtaccagaaatatttgattctttgtatcggttgc

SEQ ID NO: 10048 - DNA, 436 bp, Triticum aestivum
  Clone ID: LIB31-032-Q1-E1-D10
attcccgggtcgacgcgatggggttgccgttccaagacggccatctgcatctgaacacccaggctcaggtccagctgggacatatgctggctcagtcctatttaacttatggtacattcaaacactagttctccctgtacctccaaagagatccattatttttttgttctctactttagttaatttcctctctgaactcttggttgagcacattggattgggtataaacatgccaatgtaattcagtacaagttctccatgatcaatgagtacggagaacctccggaatcttgcagcttcataatggaagctgctccctttttgcctattacgtttgagaatcatagcaattctagtgattgtgcattgtaagcataataagaaaagtcatctagcacacagagtggtactgaatttgagataatgcatcgataaa

SEQ ID NO: 10049 - DNA, 439 bp, Triticum aestivum
  unsure at all n locations
  Clone ID: LIB31-032-Q1-E1-D11
cccgggtcgacacgagtgtggcaaacgaccggtctaacgctgccaaggatttccaggtcagcggatggtaccaaggagcagaaaacgagtcagacaagcaaccacgcacgccgacaaacctgggggagttcacttacgacctcgagaagagcaacgcccagaccttccagctagacaggaccaccgccgacgcgtcggtcgtcaacatggtccggctcgacttctcctcgaaccacgggcagcctgagctgacgtgcatctaccgcttcagggtgcatggcagcgagcctggctctctcggcactgcggcatcgtgaggcctgatctagttagtacctgtgtgcctgggaccatacggtctttcctgtttagctttgattgaagacttgaagcccctgcgagacagtaggttcaagttgattctaatctgtancataat

SEQ ID NO: 10050 - DNA, 280 bp, Triticum aestivum
  unsure at all n locations
  Clone ID: LIB31-032-Q1-E1-D9
gctgtctcatgtaccgtggtgatgttgttcccaaggatgtcaacgctgctgtggccaccatcaagaccaagcgcactatccagtttgttgactggtgccccactggcttcaagtgtggtatcaactaccagccaccaggtgttgtcccaggcggtgaccttgccaaggtccagagggctgtgtgcatgatctccaactccaccagtgtcgtcgaggtcttctcncgcattgaccacaagtttgacctcatgtacgccaagcgtgccttcgtccactggta

SEQ ID NO: 10051 - DNA, 437 bp, Triticum aestivum
  Clone ID: LIB31-032-Q1-E1-E10
ttcccgggtcgacgagattgtcaatccggggcccgtatatctacacaatatgttcccctttgagaggttcatgggagtcctaaagaaatatgtcagtaaccacgctaggccagaaggaagcatctccatgggccatcatacagaggatgtcattgggttttgtgttgactttattcctggccttaagaagataggtctccctaaatcgcggtatgaggggagactgactggaaaaggcacgcttggaggggactcaataatatgcagggatggatattcttggtctcaagcacactacacagttctacagaactctaccttggtgaccccgtatgtcgatgaacacaagaatagtctgcgctccaaacacccggagcagtgtgacgattggattacatgtgaacacatcaggactttcagcagttggttggaaacac

SEQ ID NO: 10052 - DNA, 453 bp, Triticum aestivum
  Clone ID: LIB31-032-Q1-E1-E12
taccggtccagaattcccgggtcgacagcgacccgaagactcaaatgctgggtctgcatgcggtcagcggctcggggaagagggacctgagaaagcacgagacagagtctgccggcgtcggaaatcatcaccgactaggtcggcgcagtccacatacagagtcaacccccaggccccaggatggacgaaaaggttggactgaacctgctgatggttgggagacggagctatctagcctgcttggttgcgctggtgcacatggtgccggacgacttgctgctgagcacgggctatctgctgagtgctcatcctcctcagatatgagcgatgaaagttgaagaagcgacacagccgagcctgcggaaaaatgcagacctatagactgaaactcgatatcacgcttggagcctgcaagatgcaagaactatggtgttgagggtcaccgccgcaaca

SEQ ID NO: 10053 - DNA, 407 bp, Triticum aestivum
  unsure at all n locations
  Clone ID: LIB31-032-Q1-E1-F10
gtaccagtccagaattcccgggtcgactcaaccatatcgttctctttgttccattgtcgaacccctcagtatcctcttcggctggaaactgcagacaacgtttgccgtgaaaaggagtatccttcacaagagagctacgtccatctgattcacccttgcgataattcttcatcacaaaggatatgtaggctggattgagacgcatggatatcccatctttaactcgcaccagtcctctcactgctttcttccacatgtcaacagtgacaatccaagcctcagcatcgcgatagtcccacttggagaggaggcanacataatcgccacagaggatcggacaagctgtttgcatgtcgctcataggcaactttttagctctagaagatggtttcaagttcttgggtggc

SEQ ID NO: 10054 - DNA, 426 bp, Triticum aestivum
  Clone ID: LIB31-032-Q1-E1-F12
gtccagaattcccgggtcgactcgcctagggtttctggatcaaggaggtatttatagagcgaacaggcggtgcgggaggccaccaagcggggcacaacccaccagggcgcgcctggtcagcctgtgcattcggtttttttggtttgattcggtttggttcatacggtttttggtttatacggtttttatactttggtttatatggttttatacgaagatatggtccggtttcggttgcaaccgtttgctttcggtttggcttccgtaataaccatattaaccaaagttgacgcgaatatttgaatggacacgaaacatttttggtcacatgatttggtatctgcatgtagccatgtacctaagatttttcttgtaagaaatgcctacggatattagatcattattagatggcagtggcacacatga

SEQ ID NO: 10055 - DNA, 439 bp, Triticum aestivum
  Clone ID: LIB31-032-Q1-E1-G10
aattcccgggtcgacacattattgcctgaagatgcttggttattgctcaagaggcaggtactctcaagtgagatagatgaagattacacagatacgctaaaggatatcggattgaaaattatagaaaaatgtggttatttaccacttgccgttaaagtaatgggaggattattgcgtgaaagaggagggctacgtcgtgattgggagcatgttttggatgattctaaatggtcagtaactaaaatgcccccagagatcaactatacagtatacttaagctatgaatatatgccttcatatttgaagcagtgctttctatactacactcttcttcctaaaagtaaaccttataatatggatcaagtagttgcaatgtggatgagcgaaggttttcttcatggaaactcgagtgatttagaagaattgggaagaaattact

SEQ ID NO: 10056 - DNA, 448 bp, Triticum aestivum
  Clone ID: LIB31-032-Q1-E1-H10
gtacaggtccagaattcccgggtcgacgtatcataggcgccttctgtccaatgagtggatgatatctgtcccaacgatgagccaacacgtgtttcctccagccaatgatgattttacacatggaaaatccccattggtcggggttgttaacgggttatcggatccaaaacccgacccgatagcttaacagcgttctgttacggtggatgccacatgtcggtcacccttgatgaaagcacttttgtgacgcgcgatttatcgtcatggaagtggacacttctgtgatgataattttggtaatgtcatggaacacttctacgacagcacaggtatgactatcttgattctgtcataaaatcgtcatggatgtacatgcatgacaaaaaatgcgacctactgtgacaaacacgtatcatcacggaagtgtatttttttgtagtgtaatatg

SEQ ID NO: 10057 - DNA, 434 bp, Triticum aestivum
  Clone ID: LIB31-032-Q1-E1-H12
cccgggtcgacacacgacacaaggggttggcggagtgttggggacctcatcgagcgaatcggggatggtgttggtgtaggaaggcaagtgtacattgctggagaggggatcaacacggtctccatggaggtgcttaaggcaaagtacaacaacttgcgttacctggatgagtttcagaggctctggagaaaagaaagcaagtggttcttggagatgaagaggctcaatggtggagttcctgtgaagtttgatgggtacatgcgtgagctggttgacagggaggtcttcctcaagggcaagaagaaggtcgaggtgctccagtgattgcttctccaagataaatcgttggagaacacgtcatgctttttccaagtgaatcgtgtatagaccgtgtctgaatttgttgtcaggtttagggtatagatgatccagtc

SEQ ID NO: 10058 - DNA, 437 bp, Triticum aestivum
  Clone ID: LIB31-032-Q1-E1-H9
attcccgggtcgacgacagctacaccaggcaatgttgatgcagcagcatagcactgaagatggattggtggcatgtggctgcggcgccctcatacccggcaggcgtcctggttgagaagtgcgccggactgctgggtgccccatacccggcacgcctcctggttgggacctcaggtcttagatggtaggtttggaatcgaggtccgtttggtattacgcccagactaccagcatccctccatcaactggatacgagtatcgatagatgttgccctagacggtggctttagtcttagtagtgtctgaatttgtaaggtcttgtgtgaattattaataaagtggccacatgcatcgttcagatgcagaagcctggggtcgtcctctttttcgaagaatatatatttctttgcatgatcatgtatttgacatcgtatttg

SEQ ID NO: 10059 - DNA, 448 bp, Triticum aestivum
  Clone ID: LIB31-044-Q1-E1-A9
gtaccggccctagattcccgggtcgacgagcggccgctattttttttttttttttttttttttttgcaaaagaaagtgaaacgtaacttcttggaaccagaaacagcacaggacagaaaacacaattaaatagcaagttgaccatctttagattgtgagtcgatcaacagctgtcttaatatcaaagagctcattctaacacaaacgaacccataaaccatggtcttaagctacaatcccgataaacaaaatcatcacagtgttcgcagaattcaaacatcaacagagaggacagcaccccacgcacgcattggatctgaagacctgttgggtgctcccacgtgctgaagagtcgcttcttcactccatggtagctccagaaccgaaagtgccgccgccgcctccacggccaaatggcctggcagcaccaccagcacccctgaaagct

SEQ ID NO: 10060 - DNA, 439 bp, Triticum aestivum
  Clone ID: LIB31-044-Q1-E1-B10
ttcccaggtcgactccgaggaactcactgtggaggagcgcaacctcctctctgttgcatacaagaatgtgattggagcccgccgtgcctcatggcgcatcatctcctccattgaacagaaggaggagagccgtggcaacgaggaccgggtcacactcatcaaggaataccgtggcaagatcgaaactgagcttagcaagatctgtgatggcatcctcaagctgctcgaaacccaccttgtcccgtcttccactgcccctgagtccaaggtcttttatcttaagatgaagggtgactactacaggtatcttgccgaattcaagagtgggcctgagaggaaggatgctgctgagaataccatggtggcatgcaaggctgctcaggatattgctttggctgagctggctccaactcatccgattaggcttgggctggcacta

SEQ ID NO: 10061 - DNA, 241 bp, Triticum aestivum
  Clone ID: LIB31-044-Q1-E1-B11
tcgacgacgccgacgtgagagaacacgtgcccttctcgcacacagatctcggcatgaggatgtctgcactgctaacctcccgcgtatgctggcggcatcggtattgatcggcagtacgacgtccgaagaattgacgtataagtcatgcgcgtaataggacaataacatatcatgcctaacatcgcgatcgacattcgtgcatgataccacatcttctgctgagtcatacgtgtcacgtcca

SEQ ID NO: 10062 - DNA, 410 bp, Triticum aestivum
  Clone ID: LIB31-044-Q1-E1-C11
attcccaggtcgacatcgtaagatgtatacggacgaatgtgcctcatcatgttggcgattgcttcctcactcaggctaacttacgatacgagagacttggctgcaggtgagacttatgttttcaacttagtcactaactgcaatttctacttcctggcataagtttttttccggcgatcaacactcattgcgtcttaacactgtaagattggggaaagtgtaaatgcgactcttactagcatcaagatccaacccttgacacgggagtataaatacctcacgtaacagtttggccgcactaaatgatcgatcctgtcatccgcttgcatactcagttatatcacttccatattgcttcagtcgatctcttcacaggctgtcggactacaccttcatgtctgcgaaactcc

SEQ ID NO: 10063 - DNA, 425 bp, Triticum aestivum
  Clone ID: LIB31-044-Q1-E1-D12
ttcccgaggtcgacgtccatacataactgaaggacgggaaataggatgggacagagagagagagaggagagagagggggagggagaggggtagagtgctggatgggtgatggagttgcttctcgaagatggtgggagaggcctactagacaaaccgagggtggaactgcaatattatcaataagagtggggatgtgtttctgtgtgtgcctgtgcgtgatagatctgtcgggacacatccatggatgatgaaggggaaccatgtgtttggtaagcaaacctaactagatcggtagatcaattgttttttttgtcggaggaacggagagacataactaatgaggtagatcgatcgacgcgtggggaaaaacgagttataaggacctagctagctatatgtatagccggagatctgtcggtgtacat

SEQ ID NO: 10064 - DNA, 356 bp, Triticum aestivum
  Clone ID: LIB31-044-Q1-E1-E9
cccgaggtcgacggagacctaatggacctggtgtgggggctgcagtattccatctgcctgcggcgctgtcgaagaggaggactccgaggtccgcctcgcagagcacggcgagctcatgcgccttcttgagcagccgggcgctgcgcttgccgaaggtggactgcgtggagacgtcgttcgacggtaccaacatctaagtgggtcgcgtctctggcggtcgctcgagaggatccaggcttgccttagcttgcagtgcatgtcgtacctctgctggagtgtcatcgtaaatcacactgtcggtccgttgttttataacttcgtgactggcaaaatgcttccgtttgcagacttagtcg

SEQ ID NO: 10065 - DNA, 434 bp, Triticum aestivum
  Clone ID: LIB31-044-Q1-E1-F10
cccgaggtcgacagaaacagagcacaccgagatggcaatgacagaggctggcaaaccagcaacatggtgcatgtctctggcccagagtgcttcagcagagctattagagctgtagtgattccccccaacttcaggttggcgactggagtcagtaagttcaccggagagtccaagcctgacacctggctcgaagactaccgagtggctgtccagattggtggcgacaatgatgaggtggccatgaaacaccttcctctgatgttggagtgctcggctagggcgtggctaaatcagttggcgcctggcagtatctatacttgggaagatcacgcctgagtgtttgtcagaacgtttgagggtacttgcaagcggctagcaggtttgacggaattacagtgttgcgtccagaaaccgaatgaaactttgagatatta

SEQ ID NO: 10066 - DNA, 408 bp, Triticum aestivum
  Clone ID: LIB31-044-Q1-E1-G12
gtcgactggaacgactaaatctacaaaatccacataccgggtgtcctcaagtatgtgctcaagtaaaaccacagcaaaatttatcaagatatatgcaccttatcttctccacaagccaaaaaccacatcgcgcgtgttcttcttgcatgggtatgtgatggaaaaacaaggaagacttttcacatgccggctagattattatgttggagaaggacatcattgatcggtgataaaaacaaaacaaacaagcatgtattcttgaattatatgttcaggtttgtgtaatttgctcatgtcttgaaatgagctgggatgataaaatatatgtattcatgtcatgtttgaaacaaagcagacaagagaaggctgacaaaaaagaagcggccgctctacaggatccaagcttac

SEQ ID NO: 10067 - DNA, 465 bp, Triticum aestivum
  Clone ID: LIB31-044-Q1-E1-G9
ggtacgcctgccggtaccggcccgtagattcccgagtcgacttccaccaaagcgaaatccatcatctcatcgaaagacgggacacctccgcctctatcaagtggtatcagatttccaggttgctcggtgagattttacagtttttcgtagtttagatcgagtctgttcttcatacctacagtccacgaaaaagccacaaaaaaaattagggttagttcatcatatccgaaccaatctgagcctttgcataatctttttagggttttgctttgttgaatttgcggttgcatcgtcgtgtctagttgctggtcttagagtctagtcttttagagtttcgagttctggtcataagttgtcacgccgccgccgcaccatcatcatcgcccctgccatctaccaccaccgcttatccgccaccgctccgaatccgtatccatataccaccaccaatccgtgtccatatac

SEQ ID NO: 10068 - DNA, 422 bp, Triticum aestivum
  Clone ID: LIB31-044-Q1-E1-H12
tcccgggtcgactcccacagaaaatgatagccaccatctcatcgaaacatcgggacccttgcctctatcaagtggtatccgatttccaggttgctcggtgagattttacagtttttcgtaaattagatcgagtatgttcttcatacctacagtccatgagaaagccacaaaaaaatttagggttagttcatcatatccgaaccaatctgagcctttgcataatctttttagggtttttgctttgttgaatttgcggttgcatcgtcgtgtcaagttgctggtcttagagtctagtcttttagagtttcgagttctggtcataagttgtcacgccgccgccgcaccatcatcatcgcccatctagcacttttgcttatccgccaccgctctgggatcatatccatataccaccacaaatccgt

SEQ ID NO: 10069 - DNA, 422 bp, Triticum aestivum
  Clone ID: LIB31-044-Q1-E1-H9
attcccgaggtcgacgtactcctttctggctgggagatggtcatggggacgattgtatggcgtccagatatgctctcccacaaagagccgcattgccttgatgtagttgtcactatccaatgtaaagcggtgatacattcctgcatgcaaaacaatcatgccacctttcttaactgctatacggatccactgttcgttttggtccctcacatcaaagtatccactgccctcgagacaatagcgtatctcttcatcagtatgcaagtgctcttcatagaagttcttcagcttggcctcatactttggcaacttctctggacatacatctcaaatgtccacataagagtatcgcctggcctcacggattttcttgagattctcgtcattctcccagtcatcagcattcaggttccagcttacaa

SEQ ID NO: 10070 - DNA, 463 bp, Triticum aestivum
  Clone ID: LIB31-045-Q1-E1-B12
taccggtccgaaattcccgggtcgaccgcaggtatgatcaaggtctctgctgggtgtcctaccttcgatggtacggactacccctactggaagaacaagatgcgaatgcatcttgaagcaattgataacgatctctggtatgttgtggaaaatggtgttccctcagtcacaccttctctgaatgctgctgatgtgaagagattcaagcaactcgactctcaagcgaagaatatcatatgtggccatctgagcaaaggacactatggcagagtgagtgctttggagacagcgaagtttatctgggacaggttgtccaaagtgaatgaaggagtctcaactcagcgtgaatctcgagttgatgttcttcgcaatctcttcaaccgcttcaaaagactcgacaatgaaaatgttcaacaaaccttcgatcgccttactgacatctcaaatgagcttcaagcacttg

SEQ ID NO: 10071 - DNA, 465 bp, Triticum aestivum
  Clone ID: LIB31-045-Q1-E1-B4
gaattcacgggtcgacggagaagaagcagttgaacccgatgcgggagatcaaggtgcagaagcttgtcctcaacatctccgtcggggagagcggcgatcgcctcactcgcgctgccaaggtgttggagcagctgagcgggcagtcgccagttttctccaaggcgaggtacactgtcaggtcttttggcattcgtcgtaatgagaagattgcctgctatgtgacgatcaggggtgagaaggcaatgcagcttctcgagagtgggctgaaggtgaaggagtacgagctcctgaggaggaacttcagtgacactggttgctttgggtttggtattcaggagcacattgatcttggcatgaagtatgacccatcaaccggcatctacggcatggacttctttgttgttctggagcgagctggataccgtgtctcctgccggcgccgatgcaaagccgtgttgggattca

SEQ ID NO: 10072 - DNA, 426 bp, Triticum aestivum
  Clone ID: LIB31-045-Q1-E1-B5
ctgccggtacaggtccgaaattcccgggtcgacagacgacagaagggatcctgatgaagaggaagagaaataagccagacgtgatcggactgaccggtctcctgtatttgtcgagtgttcttgttggttgctggggctcttctggcctgtacaatggtggcaccacaacagccgttttggtggtggtctgggcaggtgctagactgtctgtttgttagccatttgatgtgatggccctgcgcgcctacctggttgttgtgcttgactcgtggtgttattgacctgtagtctctttagttgccggtcatgtacaatagctgtttggttatactactctgttcctttcctaggtagctagccctgactgtaatttgcagcatgcatacttgtccgtgttctgttccttgcattttatccatgtaaaac

SEQ ID NO: 10073 - DNA, 495 bp, Triticum aestivum
  Clone ID: LIB31-045-Q1-E1-B6
cgcctgccggtaccggtccgaaattcccgggtcgacatcgagccagatgcgcatgtcaagcaggcgatgaatgagatcaatgcagctgcaaggatgagggtggctgcaaacgagaaggcggaggctgagaagattgtccagatcaagcgtgccgagggtgaagcagaggccaagtacctgtctggcctcggtatcgcccgccagcgccaggccattgtggatggcctgagggacagcgtcctgggcttctcagtcaatgtgcctggcaccactgcaaaggatgtgatggacatggtgctgatcacccagtacttcgatactatgaaagagattggcgcgtcctccaagtcctcggcggtgttcatcccccatggccctggtgcggtgcgcgacatcgccacgcagatccgtgacggtcttcttcaaggccagtctgcctctgacaactagcagtttgcttcgccggcatgaactttggaactgctggtggtttgt

SEQ ID NO: 10074 - DNA, 492 bp, Triticum aestivum
  Clone ID: LIB31-045-Q1-E1-B8
cctgccggtacaggtccgaaattcccgggtcgacatcgaaccagatgcgcatgtcaagcaggcgatgaatgagatcaatgcagccgcaaggatgagggtggctgcaaacgagaaggcggaggctgagaagattgtccagatcaagcgtgccgagggtgaagcagaggccaagtacctgtctggcctcggtatcgcccgccagcgccaggccattgtggatggcctgagggacagcgtcctgggcttctcagtcaatgtgcctggcaccactgcaaaggacgtgatggacatggtgctgatcacccagtactttgatactatgaaagagattggcgcgtcctccaagtcctctgcggtgttcatcccccatggccctggtgcggtgcgcgacatcgccacgcagatccgtgacggtcttcttcaaggccagtctgcctctgacaactagtagttggcttcgccggcatgaacttttaagctggtggtggtttg

SEQ ID NO: 10075 - DNA, 445 bp, Triticum aestivum
  Clone ID: LIB31-045-Q1-E1-B9
tgacggtccgagattcacgggtcgacatacttcgcgaatggcagcagtattcacatctagcagcatggcagcagaccagttttttttcttttcctgcatgtgtttttcttttcttttttattttctttagtatggatctatctctctgatcaagcaagaagagatcggcagctccagcgacatgacgagccgtttccgggtttttatgaagggaactatttggggtcgcgcggaagcaaaactagctagggtttattagtgctgctctagttccgcttgctattcctttcgcttgttcgtttgtttctttaaggattttattatcaaggttgtaaggctggggatgtgcagctagcttcagattcaagcctgccgtctcgcctgcttgtacattgtaaaacagaaccgctgctctccagtgactgaatgattataagcagctact

SEQ ID NO: 10076 - DNA, 456 bp, Triticum aestivum
  Clone ID: LIB31-045-Q1-E1-C10
tacggtccgagattcacgggtcgacgtctcatagctgacttcgatccaatgactggatgacatctgtcgcaacttcgatatggcacgtgtttactccagccaatgatgattttacacgtgggaaatccccattggtcggggctgttactgggttattggatccaatatcggacccgatagcttaacagcgttctgttacagtggatgccacgtgtcggtcacccttgacgaaagcacttctatgacgcgggaattatactcatggaagtggccacttccgtgatgataatttttgtaatgtgatggaacacttctacgacagcacaagtatgaccatcttgattctgtcataaaatcatcatggatgtacatgcatgacagaaaacgtgacctactgtgaaaaacacgtatcatcacggaagtgtatttttttatagtggaaacgtgtgcaatggc

SEQ ID NO: 10077 - DNA, 457 bp, Triticum aestivum
  Clone ID: LIB31-045-Q1-E1-C11
taccggtccgaaattcacgggtcgacgccctgcggcttacaaagtcccggccggttcataaacaatgtctggctcgatgactagttaagtctaccttatgatacaagtaatattattacaacgggttactacaatgggccttaagtcgcctgcagtccttaagctctctatgaaccgccatcttcatactttgtcttgggattctctctggtgagtcctctttgggtaacccggcccctcctgggcggcttacacaaatagttatatccccaacagttggggtggttctacatcaccgagccacgcgatcccaaatgggcggcggcccccgaattccgatctggctttcccacacggctcacctcctggaaagagacaggcctaacatggggggattcagaagagctgaccggacttcaaacctgcgtccaaaagctggtgaacaagaacctcaagc

SEQ ID NO: 10078 - DNA, 482 bp, Triticum aestivum
  Clone ID: LIB31-045-Q1-E1-C2
tccgaaattcacgggtcgacttccaccaaagcgaaatccatcatctcatcgaaagacgggacacctctgcctctatcaagtggtatcagatttccaggttgctcggtgagattttacagtttttcgtcgtttagatcgagtctgttcttcatacctacagtccacgaaaaagccacaaaaaaaaaatcagggttagtttatcatatccgaaccaatctgagcctttgcataatctttttagggttttgctttgttgaatttgcggttgcatcgtcggtctagttgctggttttagagtctagtcttttagagtttcgagttctggtcataagttgtcacgccgccgccgcaccatcatcatcgcccctgccatctaccaccaccgtttatccgccaccgcttcgaatccgtatccatataccaccacagctgtcatataccaccaccgctgccatctaccaccatatatccaccaccaatcc

SEQ ID NO: 10079 - DNA, 497 bp, Triticum aestivum
  Clone ID: LIB31-045-Q1-E1-C6
cgcctgccggtaccggtccgaaattcccgggtcgacaaggtttgtatgatagtcaagaagcagctggcagtccctgatgggacccctgtcacagcggagtcgaaattttctgaacttggtgctgactcactggatacggtaaatccgcaactccccatcccacagaaatggcagtagcccaaaagcagcgccgttcatacgtaacaccgattgtgttttgcaggttgagattgtgatgggcctcgaggaagagttcaacatcaccgtcgatgaaacaagcgcgcaggacattgcaaccgtgcaggatgcagcggaccttatcgagaagcttgtgacagagaagacagcgtaagcacctcggttcattggacagctttagaaggcaaaggtgtcatctggaaccgtggacttctgatttttcggtcgcatttggggcgagagaaaataatttatggacagctttgcattcagtctatgttgtgtgttcattaccattt

SEQ ID NO: 10080 - DNA, 364 bp, Triticum aestivum
  Clone ID: LIB31-045-Q1-E1-C7
gcctgccggtaccggtccgacattcccgggtccacatggtttgccacatggccaagactcagtagagtgtcctgcatgccattgcggtgccagctcagacgtgtctctgcgttgtcgatgctaacactatgtgtggatggcgtcgccagatcacgcctggattcatgttagttggacatgaattacattctgttttccgcatcaactaatagctgtaagggagttgctaatcaagtacgcctctttggatatggcatgagcagagtcgatgaaacaagcgcgcaggacattgcaaccgtgcagggtgcaacggaccttatcgagaagcttgtgacaaaacacgacagcgtaagcacctccgttc

SEQ ID NO: 10081 - DNA, 453 bp, Triticum aestivum
  unsure at all n locations
  Clone ID: LIB31-045-Q1-E1-C9
taccggtccgagattcacgggtccacctcggttggcgagagcggtaagcttgtcgatgtcgggtggccgtctgtctgggtcaggatcgcgacccagtgggcaacggcaggtctgttcatctggtccctcgttgctcccctcctgttcccagacagggagttctagatcgacctggttacctgctaagagtgcatcatccgtttggagcacctacttatcgtatcgaacgtgtttcggctgtgatgatagctaagctgactatctgtatctggtctgtaatattgtgtgagcaaacccatggcaaggagctggtgtttgtgtgacgttgttgagtctggtttgcataatgtgtgacctaaggcattgttgccagtatttcaacagtgaagatacgctctttggttgtatataaaaaaaantaagtgtnaggaaaacagaaaaagcggccgctct

SEQ ID NO: 10082 - DNA, 432 bp, Triticum aestivum
  Clone ID: LIB31-045-Q1-E1-D1
cgcctgccggtagccgtccgaaattctagggtcgacgccgagaagctcagggagatcggcttcatcgtctactccatcggcaagccgctcgacggctggctcaaggacatgcccgccgtggcctaagttcacctcgtcggccggccggatcggaggaagagcaagaagtggtttgaccgtgattcattctttatagtttgcattttgcaggagaagcatccacattttctctctcggccataagaatttagtaaatcttcatgtcttgttaagtttccgatacatgtttgcgccaccccgtctgtagatcttacttataatcaaatcctcgggcccctgtgctgcctgaggaggtttttccgttgtatcccatgaacgaactttgtaacctgttttgctgaaatcattacagaatccaatgtgttttttaca

SEQ ID NO: 10083 - DNA, 491 bp, Triticum aestivum
  Clone ID: LIB31-045-Q1-E1-D5
acgcctgccggtaccggtccgaaattcccgggtcgacatcgagccagatgcgcatgtcaagcaggcgatgaatgagattaatgcagctgcaaggatgagggtggctgcaaacgagaaggcggaggctgagaagattgtccagatcaagcgtgccgagggtgaagcagaggccaagtacctgtctggcctgggtatcgcccgccagcgccaggccattgtggatggcctgagggacagcgtcctgggcttctcagtcaatgtgcctggcgccactgcaaaggacgtgatggacatggtgctgatcacccagtactttgacactatgaaagaggttggcgcgtcctccaagtcctcggcggtgttcatcccccatggccctggcgcggtgcgcgacatcgccacgcagatccgcgacggtcttcttcagggccagtctgcctctgacaactaagcactttgcttcgccggcatgaactttgaagctggtggtg

SEQ ID NO: 10084 - DNA, 483 bp, Triticum aestivum
  Clone ID: LIB31-045-Q1-E1-D6
cctgccggtaccggtccgaaattcccgggtcgacatcgagccagatgcgcatgtcaagcaggcgatgaatgagattaatgcagctgcaaggatgagggtggctgcaaacgagaaggcggaggctgagaagattgtccagatcaagcgtgccgagggtgaagcagaggccaagtacctgtctggcctgggtatcgcccgccagcgccaggccattgtggatggcctgagggacagcgtcctgggcttctcagtcaatgtgcctggcaccactgcaaaggacgtgatggacatggtgctgatcacccagtactttgacactatgaaagaggttggcgcgtcctccaagtcctcggcggtgttcatcccccatggccctggcgcggtgcgcgacatcgccacgcagatccgcgacggtcttcttcaaggccagtctgcctctgagaactaagcactttgcttcgccggcatgaactttgaagctgg

SEQ ID NO: 10085 - DNA, 462 bp, Triticum aestivum
  Clone ID: LIB31-045-Q1-E1-D9
taccggtccgagattcacgggtcgacgtcgacacggaggtgaccgcgggcgcgcagccgaagaagaggacgttccgcaagttcagctatcgcggcgtggatctcgatgccctcctcgacatgtccaccgacgaccttgtccagatgttccccgctcgcgcccgcagaaggttcaagaggggtctcaagaggaagcccatggcgctcgtcaagaagctgcgcaaggcgaaaaaggacgctcctgctggtgagaagcctgagccagtgaggacacatctccgtaacatgatcattgtccctgagatgattggcagccttatcggtgtctacaatggcaagaccttcaaccaggttgagattaagcctgagatgattggccattaccttgcagagttctctatctcctacaagccagtgaagcacggtaggcccggtatcggtgccacacactcctcccggttca

SEQ ID NO: 10086 - DNA, 398 bp, Triticum aestivum
  Clone ID: LIB31-045-Q1-E1-E1
taccggtccgaaattcacgggtcgactcatgacgtcttagtgttccctgcagtcttaacagttcgattatacttcatccaacatacaacatcactactcatcatacctcatcatgccatttcggttacaatcgtctctatgagtaactagggacaatctcaggtctacccactacagagactttcctggcttcctttcagcatatgatataaccattcttatgatattaccagcttcagcattatcaattgctatggaatctctactatgcattcatacatctgattatatcaccacttttcgataacaagttctacatattgatgtggtgttataatcgtgtaaacactgcatgatgtatattaatccagtgttcacaatgcttgcctccaagagca

SEQ ID NO: 10087 - DNA, 414 bp, Triticum aestivum
  Clone ID: LIB31-045-Q1-E1-E3
ttcacgggtcgacttgaggacactgtctgctcggggaacgcctctcccacgtggcaggccattcagtacggcctcgagctcctcgagaaggggattctatggcgcgtcggcgatggccggaatatacgcatatggcgtgaccgttggctcccaacgaaaccgacggggtagccgatcacgcggcacgggacttgccgtcttcggcgggtctcagagctcctggacgagtccgacgcctggcgtacgaacgtgctgcgacagtattttctcccggcggatgtcgcgaccatcaccagcattcgcacgtcaccccgcatcaccgacgacgtcatcgcatgggccccgaagaagaacggcatcttcaccgttcgctctgcatatcgccttgccatggacgagcgccagcgtccattg

SEQ ID NO: 10088 - DNA, 482 bp, Triticum aestivum
  Clone ID: LIB31-045-Q1-E1-E5
ctgccggtaccagtccgaaaattcccgggtcgacgctggggaagtaatcgtcggagtccgtgatggaaaagtcagtagtcgcgcggagccctccccaaaaaccttatcaccctcctcctgtacagcagcaactcagagattggaaccggtggcgagaggaagaagaagttctggtgcacctctctgagaggagaggcctcccttttataggcgcaagagcagcgacggagataaaaatttagacattagctcggctcattccctcccttttataggcgcgggcggcgaaggaggagcgcgcgtggatgtccctcttgttctcatgctcatacaagtgaggaaagaacctcccttataaagaggtcaaactccctctaaactagcaatgtgggactaaactttagttccagctctttccttgcacgaatggcctgcgtgggcctccaagatttattacgaaatttccgaaactgcttattggg

SEQ ID NO: 10089 - DNA, 487 bp, Triticum aestivum
  unsure at all n locations
  Clone ID: LIB31-045-Q1-E1-E7
gcctgccgngtacagtccgaaattcccgggtccaccaatacaggcatacaggccaatatcatgaaagtcgatacttcagcatttgaaattttggagagtacatagtagcatgacaaagagtaaccgtacatcatggctgggttgaaacgtcagaactggaaatccacaaggatttagttcggaacaagggccatgactagttttgacgacataaagcttaacctctcagccatgtgttcctgtacgacgagttgtctcgcagcgaggcgtcatgtggcttgtactccatcagatacgtgtgcggcagcttcaagtgcctcttaatcgagtctcttaatgtcatcacagcctgatggtctgatgcattccgattccagacgcccaggatgtcttcattgaaacgacaacttagcacgatgccacagacatcatcactataatcaagttgatcacccacgagaaccagcaccaaatcctcccagaaacg

SEQ ID NO: 10090 - DNA, 375 bp, Triticum aestivum
  Clone ID: LIB31-045-Q1-E1-E8
cctgcccgtaccagtccgaaattcccgggtcgacggcaaggaccccaaggatctgcggacggagatcgacgacggcgaggtggagatccccgcttaagaaggcttggctttgggcaggttgttatgtgaggctgctgaagtagtttctcctatctagatgcttcctgatgcagttgagagaatggatgtgatatcttcacttgttctactcgtgctgaagaagaaacttttgtcatgctttagtggttccattgtgagactattttttactggtttaatgagtaccttgcggaatcaatcaatgttattatggcagctagaatatcaggcgctactgggggtagcgcgaagaaaaagcggccgctctaaaggatc

SEQ ID NO: 10091 - DNA, 444 bp, Triticum aestivum
  Clone ID: LIB31-045-Q1-E1-E9
cggtccgaaattaccgggtccacatgcatgcatggaaccaacggactagctataggggggtggagcaggagccacggatggagtagccacgatggagcacccgaaaaattgtcgggtcccaccgctctccttgtccagcgttcgcctactacctgcagctgctatagctacatttgggcagtatgcatgccgttcttttacttcttttggagaaaacagaagggtactggtttgcctaatgctaagtccacaagtctaacttccaaagtggtgcaatttcagtttagtggaaaggaagactcaaattgtgatttttagaattggtttattagataatagaaaaaagaatctcaattaccatagatataaattgacaccttttccccattaagaggtgtattttgttgactcgtaatgtcgcatcaagaaaacacaagcaccatg

SEQ ID NO: 10092 - DNA, 372 bp, Triticum aestivum
  Clone ID: LIB31-045-Q1-E1-F1
tccggaaattcagggtcgacggtcttttaaccactcggtgcattctgcgagggagtggacaagtagtgaacggtgacaagggagttgtgtacacccacaaggatcttcctttgcaatgagggtagaggattcctgctgtagagcaatttttgtagaataatcctcttcaaagcccccttctctccgtgcgaggaatgaagaaagacaagagagcattgttgttactatgtcgctatctagttccgtgattattcgtgtacaatgatttatccatacaatgtcgtagttatggcactagctgttgtaactgtagaattgcatcggtacatctatgccacatatatgaagtacctgtacggtttctgatgaaag

SEQ ID NO: 10093 - DNA, 443 bp, Triticum aestivum
  Clone ID: LIB31-045-Q1-E1-F11
tgacggtccgagattcacgggtcgacttccaccaaagcgaaatccaccatctcatcgaaagacgggacacctttgcctctatcaagtggtatcagatttccaggttgctcggtgagattttacagtttttcgtagtttagatcgagtctgttcttcatacctacagtccacgaaaaagccacaaaaaaaaattagggttagttcatcatatccgaaccaatctgagcctttgcataatctttttagggttttgctttgttgaatttgcggttgcatcgtcgtgtctagttgctggtcttagagtctagtcttttagagtttcgagttctggtcataagttgtcacgccgccgccgcgccatcatcatcgcccctgccatccaccactaccgctccgaatccgtatccatataccagcaccgattcatatccatatacgaccac

SEQ ID NO: 10094 - DNA, 319 bp, Triticum aestivum
  Clone ID: LIB31-045-Q1-E1-F4
tccgaaattcacgggtcgaccgggacacgttctgcagtgcgacgtagctgccactctgttggctaacgcccgtagttactgcagtctccatcctctatcgatggacatgatcgtcgatccaccacgaagcaattggaaatcgatgtgtggtctaagtgtattaacagtagagtatccacctcggtcctgtggtagatccctgtcgcagatttagcgaataacgacatactgagcaaaatgagtgaatctacactccgggcgtatcgtctacgatacatccgtacgtagtcgtccatttgacatctctacactgcttaaa

SEQ ID NO: 10095 - DNA, 458 bp, Triticum aestivum
  Clone ID: LIB31-045-Q1-E1-F7
acgcctgccggtaccggtccgagattcccgggtcgaccgccgctggttgttgtcgctgcgcgcgctgctcagccatccggcatccggcaagacggcaatacagtatgtagccatccatgtatcatattcctgttccatccccgattccatccaaagctaaacttcagcagtttctttgattctttagtacgtattcaactattcatccctgatccatcctaattttctgtcatgttgtgtacttcctctatttcaaatttagactagaaccatgacgagtaatttggaacggagggagtacatatctaggtttcaatcatctgatgtatagatttctaattctttgtattcgaatttcttcattagtttaggacattagcctgtcagtttatccaagacaaagcatttaccaggtgcataaaagctcgggacggagaaaaaaagggggggcgctcgag

SEQ ID NO: 10096 - DNA, 454 bp, Triticum aestivum
  unsure at all n locations
  Clone ID: LIB31-045-Q1-E1-F9
taccggtccgaanatcacgggtcgacaaagctccgtcgaagattcctgtcatctcattgggatggtgaggttagggtttctcttaatgtggcgagatttggtgtcagatgattaagatctacgcaagggttcaacggcgagaactgcggctccagggcgtcggtccttaggggcacgtggacgaagacttcccgactatcatccacaaggtcaagctagctccaataggagagcggcaatagcagcgcgtcgatggcttgttctgacggtagtcagtggcggagccaaccagctcaaggagtcggacaaactctttgcaccctgacgtggtcagcatttgtccaaggaattaacaatactaatcatggttgctttgtactagttagtgaagaatggcagaagcagcccgggcagctgccccgggtcgccaggagctaactccgccactggcggt

SEQ ID NO: 10097 - DNA, 467 bp, Triticum aestivum
  Clone ID: LIB31-045-Q1-E1-G12
taccggtccgaaattcacgggtcgacagatcaatttttgtaggcgggtctcagtttaggtgtgcatgaccttacttgaactttctcaaaataatataatttactttttcgtgaccactaatttaacttcttttaagcaattattatgagtagaaaaggcaagggcgtactgaaaaaacactgcaaattcaaaaaatgtccatcgcatatttaaaaaaatattcttcacatatttaaaatacccatcatgttttttataatattcatgtatgcaggaaaattatattcatatgttgaaaaaaactatgtaactttcaggtaagtcaaaggaaaaaagtaaatgtaaaaatttggatttaaaatgagtaaaagtataaaaacggaatataacattgaaggaaaaagacagaaaaccgaagcaaacataaggaaaattgcaaaaacaaaaacgaccatctggcgcaatga

SEQ ID NO: 10098 - DNA, 445 bp, Triticum aestivum
  Clone ID: LIB31-045-Q1-E1-G4
gtcgacctcgcagtctccaaccgatccttagtggcatgattgaagggcgagactaccagctggtgaacgagaggatatgtattcggcgtgtcctgaagaggtagtccacgaaccggcaatggaggaaataaggtagatacggcaatagcagcaagtacgtcaagcgctagggatgtggatatggtgtggcataaagaggttgatgttcttgctcagtataagccaataatggagaaactgatcaagctatctttcatgatcagttacacaccaagcctatatttatgctacttctacatgttgctgtgatggtcattcggcccattttcttgaacctgcactacgatgagagatctgggctgcttctttgtggcttccaaacttaaaatgtttgtttgaaagttagtttagttttttgttgtggactcacatcttctcacatgta

SEQ ID NO: 10099 - DNA, 439 bp, Triticum aestivum
  Clone ID: LIB31-045-Q1-E1-G5
taccagtccgaaattcccgggtccacaccagcatttgcaacacggcttttggccggccgtcggcaaagaaacaagagccatccatgatttgcatggtccggttgcctaattaggatgtttgtatggcagctaagacagaagtggggttttggcgcggttggttagcgcgtatgtaaacttacaaaatcagacaatcattatgaagaaacgctcaatgaccacttggatcgccacatatacaactgaatcatctgactaggctagtacaatgtatgcgtctaaatctgtgggaacgcataagttgcatgtctgagtggtcccatcatttctaagttttctatgcgacgccaggctctataacagaaaaaaaaaatatcaattgtgtgctagcttaacagttttttataaagggaatatactaatatcaaacggatatcaa

SEQ ID NO: 10100 - DNA, 370 bp, Triticum aestivum
  Clone ID: LIB31-045-Q1-E1-G7
gcctgccggtaccagtccgaaattcccgggtcgacagtgctcaaaataaacattaattcctcaatgcttctcattgatgattccagtacaccgaaaaagaaacagtcattctctcaagaggacaagaagcttgatgaacaagaagcattgcatctagaggcaactgtcgtgtgccatcaagatatcaacgtcgatgcaatttttaatggcaattcttgttgagcgatgattattatactccttcagacttagccttgcccgttatgtaccaaagctgatgcaattttcactagcgaggcttgttgatcctgtgatggtatttataacttgatatgaatgtcctccttttgttatgtctgggatgtttcac

SEQ ID NO: 10101 - DNA, 484 bp, Triticum aestivum
  Clone ID: LIB31-045-Q1-E1-G8
cctgccggtacaggtccgagaattccgggtccacgaagacgacagaagggtacgggaacttgatcgatctcaggatagtcctgctccccaggaaagagtgcgcagagaaacttctgacgggtatgaaggaactgcagtgatggaaatttctgatgacgaggaagaaactgcagcggtgcaaatcacacaaccttctgaaagtgagaacagtcaagcgacttgtgtgcaggaagttgatcgcaatcaggatagtcctgctcgccaggaaagagggggcagataaccttgggacggtgatggaggaactgcgacggtgcaagctagcgatggcgacaaggaaactgcagctgcttaaagaaactgatggactgaatgattcttctgtccaggttagattacctgatcggatagatgggacatgacgccttaggcctctcgtttctcgtctgaaaccaccagtttgtttgtgcgggttgtatgtttt

SEQ ID NO: 10102 - DNA, 460 bp, Triticum aestivum
  Clone ID: LIB31-045-Q1-E1-G9
ggtccgaaattcacgggtcgacgggaacatctcctcccacaaaaaacgcatcgccaaaaattctaaaataaatcgaaaagcaacgcgagcacccggacttaaaaccctcatgggctgggatattattgtctttctaatcatccaatcagaaggttggttcgctgggctggcctattttgatatacatgccatggagtggtgtggcgccaagtaacaagcttgcgtgtgtactatggtaaaaagaagtaacaagaatgccaatcagtggcgtataaggcgccaaataggatttgaggccgcagcgttcgttacatgtgacacaaatcacctcttctattcagcgtcatacgcgctggataagatgcaaacgtgcacagccaacttccttcagcacgtgctttgggccggcccatgtgctgggccgtctgggcctgtttttctcctttttgtttttgaactg

SEQ ID NO: 10103 - DNA, 381 bp, Triticum aestivum
  Clone ID: LIB31-045-Q1-E1-H5
ttcccggggccactcccacagacactacctagccaccatctcatcgaaacatcgggaccctcgcctctatcaagtggtatcagattaaaaggttgctcggtgagattttacagtttttcgtagattagatcgagtctgttcttcatacctacagtccacgaaaaagccacaaaaattttttagggttagttcatcatatccgaaccaatctgagcctttgcataatctttttagggtttttgctttgttgaatttgcggttgcatcgtcgtgtcaagttgctggtcttagagtcgagtcttttagagtttcgagttctggtcataggttgtcacgccgccgccgcaccatcatcatcgccttgccatctaccaccattgct

SEQ ID NO: 10104 - DNA, 410 bp, Triticum aestivum
  Clone ID: LIB31-046-Q1-E1-A5
cgggtcgacccaaacaccggaccatccaaggttgcagctccggacggcccacgtcgcgtacgatctcgcgcgttgttctcgtgtaactaaaaatagtcccacctcgcccctcgcccagctcctttacttgcttaaataccttcatcgaggtgattttagcaagcgttggtcctcattgtaggatgaatatgattcttcacccttactatggttgtcatgcatattcataatcatcatgcatattcttcatttagagatcattaatgactgacgtattttttaaataagcggggcccagtagggtgtgcttggaaatatttgagaaaccaccatgcacgttcatctttgctgcatgcaaatcgggcgggagccgcagtgccagcagctgtcaacgccttaatgaatccacc

SEQ ID NO: 10105 - DNA, 468 bp, Triticum aestivum
  Clone ID: LIB31-046-Q1-E1-B10
cctgccggtaccggtccgaaattcccgggtcgactagttactccaaagactttctagccactgcaacacaccagatttgttgtactctatggagagcacgacctactagaagagcaatgagccgggttttaccatgtttatttttttccttttactttatttttgtttttttctttttcttcacttttgcagtctaattcaacatgcttcttctgtgtctttttttactcggttttctcatgcttttcccaaaataatttcggttaacaaacgcagaaaatgttgaataagcattaaaaatggtgaacgagtattgaaaatttgttgaataagtacgaaaaatgttgaacaagtattttaaattttttgaataagtatttgaaaatggtgtacaagtattaaaaatgtggaacaagtattttaaaaaatgtttaataggtattaaaagtttttgaacgagtgtttaat

SEQ ID NO: 10106 - DNA, 373 bp, Triticum aestivum
  Clone ID: LIB31-046-Q1-E1-B12
ctgccggtaccgatccgaaattcccgggtccacattgataaacgaacgcaaatacgagaactccatgcagactgcttcaatgatgattttgttggagtaccttttccagataccgatatggatttgagatatatacctagaaaggacccaaagtggcagtcacgacatgacaatgatcatgaatctgagagtgcttccagagcattccagtcttgctgagcttgactcagatacaacatatatagtttaacttagtgatgcatatagagcagaatgtgatgctatgcattatgctatctgaaacattcaagaggtcagtcaagcctatgccaattgagctcaattcatcgttaatcgtgacttaatgttcctc

SEQ ID NO: 10107 - DNA, 360 bp, Triticum aestivum
  Clone ID: LIB31-046-Q1-E1-B6
cctgcaggtatacggtccagaattcccgggtcgacattcaggagcaaaggaggcgatgctaggctaaggtgaccctcaagcaccagagctggattgtataaaatttcttctggaagtaggtaaagatatcaaattttcacggatggtacgcggacactgctagcttgtcatatataaatacatatcctgtatctatggtaattcttataagctgcaagttaagcgtttccactgttgttgtttgctaattctttttccttaaatcttttttcatctcttgtgtagagttggacttctacattttttttgcaatttttccacttggcccagagacattgtattatttttattagttttgtg

SEQ ID NO: 10108 - DNA, 466 bp, Triticum aestivum
  Clone ID: LIB31-046-Q1-E1-B9
tgccggtaccagtccgtaaattcccgggtcgaccgaaagaccaagggggtcttggtattgagaatcttgaggtcaagaatagatgtcttctcaacaagtggttgtgaaagttatcggtagagactgatgccacttgggcgcagatccttcgtagcaagtatcttcattccaaaactttgtcccaggtgagagcaaggtcgtctgactcgcccttttggaaagggcttatgaaagtcaaagtaaccttgtttaataggacaaggtttcttattggcaacggagctagcacgcgattttgggaggatacttggctcggagagaccccccttgcgattcaatacccgtcgctatatcgtattgttcaacggcgtgaggttttcgttgcaacggtacttcaatccactccacttaatatgcagtttagaacggcgctaattggcaaccgttgggaagcatggctccatct

SEQ ID NO: 10109 - DNA, 473 bp, Triticum aestivum
  Clone ID: LIB31-046-Q1-E1-C11
tgccctgccggtaccgagtccgaaattcccgggtccaccgaaacggtgtgagtggccttggtgttattaaggtcagaatacaaaataccgcgctcctcctaaaatacttgttcaaattctacaatcgtgaagatgtaccctgggttcagctgatctgggaaacgcactacccgaacaaggtgccgcacaccgccgagccagtgggttccttctggtggaaagatgtaatgcagctcagtggaatcttctgtgggatcaccagggtggtccccggagatggttgcacctcacttttctggaaggatgtctggtttggagacccagcctccacattaatggatacgcatccgcgggcattctcatatgctctgaatgaggatgattcggttgccaagatcctcaaatccactgatcctgcctcgatcttcagtctgcctctttcgatccaggccagggaagacatcagcgagata

SEQ ID NO: 10110 - DNA, 446 bp, Triticum aestivum
  Clone ID: LIB31-046-Q1-E1-C12
cctgcaggtaccgatccgaaattcccgggtcgacatttgcctgatacctgaggtaccattcacccttgatggaccaaacggagttcttcggcaccttgagcacttgatagagaccaaggggtttgctctcatgtgtgttgccgaaggtgctgggcaggaatatttgcagaagtcaaacgcaactgatgcttcagggaacatggttctcagtgatatcggtgtgcaccttcaacagaagatcaagtctcatttcagagagataaacgtccactctgatgtgaagtacatcgaccctacatacatgctccgcgccgtgcgtgccaatgcatctgatgccatcctgtgcacggtgctcggtcagaatgctgttcatggcgcctttgcagggttcagcggcatcacagccggaatatgcaacacacataacgtgttcctgccaatacctg

SEQ ID NO: 10111 - DNA, 422 bp, Triticum aestivum
  Clone ID: LIB31-046-Q1-E1-C4
ttccagggtccacgttgacacggaagtggccgcgggcgcgcagccgaagaagaggacgttccgcaagttcagctaccgtggcgtggatctcgatgccctcctcgacatgtccactgacgaccttgtccagatgttccccgctcgcgcccgcagaaggttcaagaggggtctcaagaggaagcccatggcgctcgtcaagaagctgcgtaaggcgaaaaaggatgctcctgctggtgagaagcctgagccagtgaggacacatctccgcaacatgatcattgtccctgagatgattggcagccttatcggtgtctacaatggcaagaccttcaaccaggttgagattaagcctgagatgattggccattaccttgcagagttctctatctcctacaagccagtgaagcacggtaggcccggta

SEQ ID NO: 10112 - DNA, 469 bp, Triticum aestivum
  Clone ID: LIB31-046-Q1-E1-C6
gcctgcaggtaacggtcctaaattcccgggtcgacactcatattgaagaccatctctgcgttgaaccagccaacgagtacatccagagctgtgacattgttgccttcaacaaaatctaaatcttcctgaggcaggtgatggcggtgggtggacaatgcagcagcacaatatatctacagttttccgttgccgtgatggtgtcgtagctaaagcaagcataacatatctgccctgtgaggtttttggaccttaggtcgagttgagtcgtagtgttattactgagtgttatttgcttcgtatgaaatgagacaatgtggttggattcctgttgctattctctttctctgccgtcttcatcgcagctacctacttgtgtgtgctcgcctactttctcccttaacagatgcatggacgctggagctgttttgtcgtttgaattacaagcatggcgcctgtgccgcgttctcca

SEQ ID NO: 10113 - DNA, 432 bp, Triticum aestivum
  Clone ID: LIB31-046-Q1-E1-C7
gcctgcaggttacggtccagaattcccgggtcgactacatgatcatgttaagcaatatgacaatgatggagtgtgtcataataaacgaaacggtggaaagttgcatggcaatatatctcggaatggctatggaaatgccataataggtaggtatggtggctgtttaggtatatggtgggtgtatgataccggcgaaaggtgcacggtattagagaggctagcaaaggtggaagggtgagagtgcgtataatccatggactcaacattagtcataaagaactcatatacttattgcaaaaatctacaagttatcaaagcaaagtattacgcgcatgctcctagggggataaattggtaggaaaagaccatcgctcgtccccggccgccactcataaggaagacaatcagaaaatacatcatgctccgacttca

SEQ ID NO: 10114 - DNA, 462 bp, Triticum aestivum
  Clone ID: LIB31-046-Q1-E1-C9
gtacctatccgaaattcccgggtcgaccgcctaaaacaagacgtctgtagaagaattaacccgctttcaactttcatttcaagagaaataaacgattcaatgataaaataataatactagtctattatggttcgagaggaggtagcaggatccactcaaacactacagtggaagtgtgttgaatcaagagtagatagtaagcgcctttattatggtcgtttcattctgtccccgcttagaaaaggtcaagcggacaccgtcggtattgccttgcgaagagctttacttggagaaatagaaggaacatgtatcacacgtgcaaaatttgggagcgtgccgcacgaatattctacaatagcaggtattgaagaatccgtacaagaaattttactaaatttgaaagaaattgtattgagaagtaatctctatggagttagagacgcatccatttgcgtcaaacgt

SEQ ID NO: 10115 - DNA, 415 bp, Triticum aestivum
  Clone ID: LIB31-046-Q1-E1-D1
cgcctgtcggtaccgctcctaaattccagggtccacataacaaccaaaagatctcaatatcttccatgctacacacactataggcggttcccaaacagaatggtaaagtttgtactcccaccactaacaaacatcaatccatggcttgtttgaaacaacgggtgtcgtccaactaacaacaatcctgggggagttttgtttgcaattattttgatttgatttgagcatgggattgggcatcccggttaccggccatttcctcatgagtgatgagcggagtccactcatcgtgagaataacccacctagaatggaagatatagacaaccctaattgacacatgagctatttgagcatacaaaacagaatttcatttgaaggtttagagtttggcacatacaacatatacttggaac

SEQ ID NO: 10116 - DNA, 463 bp, Triticum aestivum
  Clone ID: LIB31-046-Q1-E1-D11
cctgccggtaccgatccgtaaattcccgggtccacctagaaatgactacatgttagtcgcctgagaaatagtcatgccgaattaaaaaatgttccaaaacaaataatggatatcattatacatgaacggtataaaagggaactggtgccctttggtgcaaatgcacaccatgcaagattggctacattatttttcaatatttccctaaccgaatttccaatagtttatgcatgaagttttcatgtaccgtggtgcttgggaatacatcattctaagcacatgatgttcatgcgcacatatatgtatgtcaaaatccatttaaatttcacagctgtattgttctatgatctgtccaaatggatttaaaagataaggaatattacaagtagatatatatgcataacttcagaaactgaagacatctttattgccttaattagcttactggccgatggaaaattgt

SEQ ID NO: 10117 - DNA, 438 bp, Triticum aestivum
  Clone ID: LIB31-046-Q1-E1-D3
gcctgtcggtaccggtcctaaattccagggtcgacaatatgcttcggagcaatgatgaacttgtcgtcaagggcactgctaagctcctgcctggcatgttggactactcaaggcttgttgatgtgaatgctcaggatccttccagtggtcctatcaattcagtgcagtttcataggaatggtcagttgatgcttgttgcaggcctggacaagcatctgaggtttttccagattgacggcaagagaaaccccaagatccagagcatatttgtcgaggactgtccaattcagaaggcggcctttctacctgatggctctgaggtgatcctttccggcaggaggaagttcttctactcatttgatctggtgaaagctgctgttagtaagattggacccttgactgggcgtgaggagaaaagcctggagagctttgagatat

SEQ ID NO: 10118 - DNA, 435 bp, Triticum aestivum
  Clone ID: LIB31-046-Q1-E1-D5
gtaccggtccagaattcccgggtcgacaagactatggaagaaattaatgaacagacagaaaacatgaaacaaatacaagatgctctgtcagctcctcttggagcttctgctgattttgacgaggatgaactggaagcggagctggaagagttggagggagcagagttggaatcccaactactggagcctgttgtaactattcctattcatacgacgcccgtcccaggcaaggcgcaaccaactcgccctgctccacagaaagcatcggctgaggaggatgagcttgctgcactgcaagctgaaatggcattgtgatcaggcccccagtgaatgaagaggtgaaatgtacaaatgattggctggacggtacgctgtcgcaggcgagtcctggctacacatatatttgcccgtgtgtataatctttggtgggagaca

SEQ ID NO: 10119 - DNA, 435 bp, Triticum aestivum
  Clone ID: LIB31-046-Q1-E1-D6
ggtccagaattcccgggtcgacggtggacttgtaattaggacaaaaataatcgggttgcatttgcgagttgagggtggacttgcaattgagactaaaaaaagatcagttgcgagtcgaggatgaacttgcaaccggaacaaaaaaatgttgggcatgaacttaaaattgggacaaaaaagtttcgagccccaattacatggacttgcaactgagacaaaaaatgtcaaagtccagttgcgggtcgaggttggggttgcaactatgacaaaagaaaatcgacccccgttgcaagttgaggttagagttgcaacttggacaaaaaattacagaccttttcatgaaaattttaaaaagaaaaggtgaaaaggtgaaaaaaatataaaaatcatgaatttaaaaaaaagaatttgaacaaaaaagaacgagagaagcag

SEQ ID NO: 10120 - DNA, 468 bp, Triticum aestivum
  Clone ID: LIB31-046-Q1-E1-D9
cctgccggtaccgatccgaaattcccgggtccacgacgacagaagaggttcgagaccaccaagtactactgcaccgtcattgatgcccctggtcaccgtgacttcatcaagaacatgattactggtacctcccaggctgactgtgctgtgctcatcattgactccaccactggtggttttgaggctggtatctccaaggatggccagacccgtgagcacgccctccttgctttcacccttggagtgaagcagatgatctgctgctgcaacaagatggacgccaccactcccaagtactcaaaggcccgttatgaggaaattgtcaaggaagtctcttcgtacctgaagaatgtcggctacaccctgacaaggttcccttcgttcccatctctgggtttgagggtgacaacatgattgagaggtccaccaaccttgactggtacaaaggccctactcttcttgaggctc

SEQ ID NO: 10121 - DNA, 453 bp, Triticum aestivum
  Clone ID: LIB31-046-Q1-E1-E10
cctgccggtaccgagtccgaaattcccgggtccacgatgaggatgcaggatgggcatcgtcgatgtcgagaacaaaatgcttaattatgaaacaaaattaataaacacttagcaaaatttggcatgacctttgctaaaaacaggacatatagagcgcctgaaattttccagaacgtaaacgaattgacatttctggcaaaacatacgccactcggaaaaatatgacatgtccaaaatgtgacatgttcaaaatatgcatgacatgtacacttcaaatttgcgtattaacaggaaaaatttctttaactaaaaaaataacaacaattgctttaactaaaaaaacacctagaattttgttaactacacctaaaacaactaaaacacctaaaattctgttaactacacctaaaacacagcaatggacacacgaaaagaaacgggcgctctagagga

SEQ ID NO: 10122 - DNA, 414 bp, Triticum aestivum
  Clone ID: LIB31-046-Q1-E1-E3
cgcctgtcggtaccgcgtcctaaattccagggtccacctcttcgagaaaagcaaccaagactgagaagattcgttaggatttcgtaaccagaccttcccccttataccccctcttaaatctcgggacgagatttcttgtagtggaggagaattgtgacgcccgggtaattaagctacagtaatccaacgataatcatgccacgtcaccccggttactattgataatctaccgttagtccaaaaccgagtcaaattcaaacattaaaataaagttaaattataaaagttttcaaaatattaaactaaaatgttcgggctatgccaaaaatggcatacgtaattatagtgcagcaaacatatttttttgaatgtctaaatgattgaaaatgaaatagaacagaacataaaatagat

SEQ ID NO: 10123 - DNA, 362 bp, Triticum aestivum
  Clone ID: LIB31-046-Q1-E1-F1
cctgtcggtaccgcgtcctgaattccagggtcgaccagctgatatcacttagcgatagttagcgtgtgaggatggagatggcacgttgtcacctatacttgtagcacgtctcattttctttcttacctcgggtgctaaatacagagaatccgtttatatgtgccacgcatggcctcatgattcccctgatttattcagtaccttgaggttcgggagttgcatcttgcaagtcaagtgagatgtaaatgtaaattgttggatcacatcacagaaaaatactcctacgtagtatataaatataaatgtatgcaagtatgtattagctgcattaatgtgagacgaacacttgaaggtgacttgag

SEQ ID NO: 10124 - DNA, 406 bp, Triticum aestivum
  Clone ID: LIB31-046-Q1-E1-F10
cctgcaggtaccgagtccgaaattcccgggtcgacttagacttcgtgaagtgtaagtcgaatgacatcacctataactgattttgcccgttttgcctccctggttagtgggttctaatttctcccgctctgggcctttctttatctgtttttttatgtctgagttgtttgtttgtttgtatttttaccaaaagggaaaagaaactacacatgaagcccatctgtaccaaataaaatgacgagaaatcctttcgttccttgtttcttctacattcttcttctttttgtcaaaaggagcctcattaaaaaaattgcacgcacaagtcggcttggtctatgtgtgtgcgcattttggttagagttgggttaaattggtgaaacaatcagctccgttcatcagttataac

SEQ ID NO: 10125 - DNA, 225 bp, Triticum aestivum
  Clone ID: LIB31-046-Q1-E1-F3
acgcctgtcggtacggctcctaaattccagggtcgacgatgttgatagaacatccttcccagccacttctacggcgtcggaaatcttgccaaatccatcaagcgaagcaagaataacctctccaggcaataggctgaagaacttcttgccagcttttgagttaaccaatgagcttgtaacagagctagtaagcttcacaactccagacagtattccagttgccac

SEQ ID NO: 10126 - DNA, 415 bp, Triticum aestivum
  Clone ID: LIB31-046-Q1-E1-F4
gtcgacccgttctacatacgtgccaagatcttgggcagcgctggggaccggcaagtcacgagttcttacctcgaaggcgtcattctggcaaaccgagataaggacaacttcctcgtgccttactttcccgagtaagtcctcccctcaaccgccccgtaacatatgaattcctagatttcgatcgtttttcttttaacattccgtgttttctgcagtgacacacattccacgctcatcctcctaagccccaaatattccatggccacgtatttcgacccggaccgtcagtcgaacgtagactacacaaatgtcaagaaggttcttgatgatgttctccccggctacgtcaaatctggaggcaccttcaccaggcctattcgtaagtacggcaagcacgtgttctcgcacaatacga

SEQ ID NO: 10127 - DNA, 274 bp, Triticum aestivum
  Clone ID: LIB31-046-Q1-E1-F8
gttacggtccagaattcccgggtcgacggaagatgggaatggcaggtcccacgcattcattccttctgacgatgtgatgggggaagatggtaacgatagatactagaccgtgcgcaggcactacacattccggcatgcctacacccaatggccgttatgccactaccttacatcgtgtctgttacgccgcatacggtaagtctatatacttacacgtctattgcatttgttcgcccagaaaggcacttcaggttgatcggcatactcaggtttg

SEQ ID NO: 10128 - DNA, 413 bp, Triticum aestivum
  Clone ID: LIB31-046-Q1-E1-G1
acgcctgtcggtacggctccgtaaattccagggtcgacgggactgtccatgtttcaagggcgcaaccgagggtccttgggatcgaccaagtgaaatccctgcgtgaacggcttgatacctgggtcgggaaggtgcacactactttgctgtctgtcgaagccgaaacacccgacctggtagcttcgtgatgttcttttggtcccctgttgaacgatggctgtgaccttacacaaagtgaacagatggatttgaaatttgtattgagtcctacgctgcaatctcgcaaaacctagagagatttgtgtgtaaacatgacgatcagtcttgttttgttttgacgtggaactcaatgtatgcgcaacggctctttcctgacgcaccaaagtgaagtgaaatcggggtcctgtttgcgt

SEQ ID NO: 10129 - DNA, 399 bp, Triticum aestivum
  Clone ID: LIB31-046-Q1-E1-G3
cgcctgccggtaccgcgtcctaaattccagggtccaccctccatctcgacctcaggctccgcggaggtatcatcgagccatccctgcaggcgcttgcccgcaagtacaaccaggagaagatgatctgccgcaaatgctatgcgcgcctgcaccctagggctgtcaactgccgcaagaagaagtgtggccacagcaaccagctgaggcccaagaagaagatcaagaactagagtgccactagtcagtttcatgggccggttgaatccatcgcgtgtcggagtttatgctattatcgtctcgtttgtcgttgaaccttattttactttgctttcagcctcgtatcgttgtggtgataattgacagtattggtatatggtagcagacctataattttgccgt

SEQ ID NO: 10130 - DNA, 389 bp, Triticum aestivum
  Clone ID: LIB31-046-Q1-E1-G5
cgcctgccggtatacggtccagaattcccgggtcgacaaaggaactgatggcttgtatttcagtgatctactgttggcttaccatttgtttttatagagggtcgtgcaacttgattgaagatgggaagatgatgagaaccgcctgatgaagaagctgctgagaaccagcgccggcgtctcccagccagcgcctgtgaatggaattgacggccagccagttttattagcgatggggcctgtatataagcaatgaaaaaggcgcgagggcgagcagcaaaacgcagaactggcgccagaaaagttgttgagaagcgagtgggcgggaaaaagttgttgcaatcacgcatatagcagacgcgtttgtgaaaaaacggataaagctcgttttt

SEQ ID NO: 10131 - DNA, 361 bp, Triticum aestivum
  Clone ID: LIB31-046-Q1-E1-G7
gcctgcaggtaacggtcctaaattcccgggtcgacttccaacaacgagatattcatcatctcatcgaaagacgggacacctttgcctctatcaagtggtatcagatttccaggttgctcggtgagattttacagtttttcgtagtttagatcgagtctgttcttcatacctacagtccacgaaggagccacaagaagcaaattagggttagttcatcatatccgagccaatctgagcctttgcacaatctttttagggtttttgctttgttgaacttgcagttgcatcgtcgtgtcaagttgctggtcttagagtctagtcctttagagtttcgagttcgggtcataagttgtcacgccgc

SEQ ID NO: 10132 - DNA, 389 bp, Triticum aestivum
  Clone ID: LIB31-046-Q1-E1-G8
attcccgggtcgacgaatgcgctggagcatgggcgcagagtgggggcttcgccgcggcaagcgccttgccgcggtcattgtcttgtcgcacccgaaagcttgtcgctcgtcgggtcttgccgggacgcgcggcgcgtcgcggcaagtttcttgaaatgccttggttggccttcccggcaagctcctcttgccggggccttgtccttcccggcaagctcctcttgccagagtcttgtcttctcagtgaaaacactttgttcttgaatggcatcaatacgagctacggaggatcttggcggacgcccggcaagccctgccactgggtgctgcgactgcccgtgcacaagttcgggatactaaggtacccctactttagtacaccgacagtg

SEQ ID NO: 10133 - DNA, 432 bp, Triticum aestivum
  Clone ID: LIB31-046-Q1-E1-H1
acgcctgccggtaccggtccgaaattcccgggtcgactttttttttttattttttttttttttagccccctcgctccctctccacacccctgagctccgtcccgaccccatggagctgcacaccgacgcatgcgaccagaggaggccccagtcgacggaagaaatgtttccacccacgagaaggcagatgtgggcgcgacgtattgccctgtcacagacggcttcatttgctgtcagttcccacggaatacggcctatatttatggctaaacagcagcactacgccgtctcacgcagacgcagggcgaagcacatcggcgcacaggactagcatgcagtgtaccgtgcaggttaaacaaaggaccctctcccccacaaaaaagcaaagggcagggaggaaaaaaaagcgggcctctaaaggatccaagctta

SEQ ID NO: 10134 - DNA, 249 bp, Triticum aestivum
  Clone ID: LIB31-047-Q1-E1-A10
tcccgggtcgacgagacacatatgaacaatcttcatcatcaagtgagacgaacccttgcacaagatcgccatgcaggccaacgacgccagatgaaaaccgacccatgagcttatcagccgttgcaagtttctactcattagtaaatcacacaatacacgatatcataagagagctaacagatatagacggtatcgattctaccgtaaacatgtgaatgcatcagagagtatcatccaattagtatacac

SEQ ID NO: 10135 - DNA, 413 bp, Triticum aestivum
  Clone ID: LIB31-047-Q1-E1-B11
cgcctgccggtaccggtcctagattcccgggtcgaccccttctacatgcgtgccaagatcttgggcagcgctggggaccggcaagtcgcgagttcttacctcgaaggcgtcattctggcaaaccaagataaggataacttcctcgtgccttactttcccgagtaagtcctcccctcaaccggcccataacatatgaattcttacatttcgatcgtttttcttttaacattccatgttttctgcagtgacacacgttgcacgctcatcctcctaagccccaaatattccatggccacgtatttcgacccggaccgttagtcgaacatagactacacaaatgtcaagaaggttcttgatgatgttctccccggctacgccaaatctggaggcaccttcaccaggcctagtcataa

SEQ ID NO: 10136 - DNA, 447 bp, Triticum aestivum
  Clone ID: LIB31-047-Q1-E1-B9
ggtccgaaattcccgggtcgactagaaattttgatcggtggaagactccatgatatctgctccagcttcgtcttcgtaatcatcatcactactgtcggggtgggagtcggtgtcgtcgatgatgatgtagtcttcagaacggatgtcctcctcaggtgtgggatctcccatgaatacttctagcttcttcttcaggtcttcattcttctccagtaatactacaatttcctcctcatatccatcgcgtgtagacttgtgttcctcttcaagctccatgttcctggtcatcaccttcagatctatcatgccggcgcacatttggttctcctggcgacgaatgtgctggtttaactcctggatgaaggctgcaatggacttgtccctccgggtgctgatcatctcccattgctcatctcggcgcccacatatcagatagatagtgtcctt

SEQ ID NO: 10137 - DNA, 465 bp, Triticum aestivum
  unsure at all n locations
  Clone ID: LIB31-047-Q1-E1-C10
cgcctgccggtaccggtccgaaattcccgggtcgactccgaggagctcactgtggaggagcgcaacctcctctctgttgcatacaagaatgtgattggagcccgccgtgtctcatggcgcaccatctcctccattgagcagaaggaggagagccgtggcaatgaggaccgggtcacgctcatcaaggaataccgtggcaagatcgaaactgagcttagcaagatctgtgatggcatcctcaagctgctcgaaacccaccttgtcccgtcctccactgcccctgagtccaaggtcttctatcttaagatgaagggtgactactacaggtatcttgcggaattcaagagtgggcctgagaggaaggatgctgctgagaataccatggtggcatacaaggctgctcangatattgctttggctgagctggctccaactcatccgattaggcttgggctggcactaaac

SEQ ID NO: 10138 - DNA, 353 bp, Triticum aestivum
  Clone ID: LIB31-047-Q1-E1-C12
cctgccggtaccggtccgaacttcccgggtcgacttgcccgtcctcccgatcatcctgtttggatgttggttcgatggggtcttcttggtcttcggcgttttcgagagtatcattgtctcatgtgccggtattgctgtcctttccgcgacgcgatttagagcggcgccgattacatcgacgctttggtggtatctcacgaggtttgtcctcgtctggaccattctcatcatcgccgtcgcattctttaagtgtgcccaccatctacacatcgtatgatgaattggccgtccagcgtccggtaaatggtgggttttgggcctgctcctctctggcatcgtcgtccataccatcg

SEQ ID NO: 10139 - DNA, 387 bp, Triticum aestivum
  Clone ID: LIB31-047-Q1-E1-D10
ccgggtcgaccggatgctcagaagacgacagaaggggggtgccattgctgtgggagctccagctgctgcatctggtggtgccgcagcacctgctgctgagtcattgacggaggagaaggttgatcagaacgaacaatctgatgaacacatgggtttcagtctgttcgactaagcgcttcagttccacccccctaccctctgtttaccctagtatctgtcgtgtgtggcctgccacatcagcgcctgcataatatctagagacctgaagttcgtgctattttgcatgggacaatgtatatgtttactaccttcgtatgtgaatgtgttactgcttccatagccttgagaagttgaatgatacatcgctggagttatgtctctcgcaaa

SEQ ID NO: 10140 - DNA, 370 bp, Triticum aestivum
  Clone ID: LIB31-047-Q1-E1-E11
aattcccgggtcgacgacaagggggacaccgagggggtgatcacgctgagggacataatctccaagctggtgcacgagccacggcattactttggggatttcttcgacggcgtcgttcccctacccacaaacagtaccgtatgacaaactctgtactactatgtacaacaaaatgtacattatctttttgctcattcccaatcttcttctcaagttggggttggggatgctgttgctgtggagagacctctgtggggacgactaatgaaccaatggggtggatgacagtgtgcgttgaataatctgagaattgcctgagctttgcgatgagaaccgtctgaagaatttcacaacaaaaaagcgggcgctc

SEQ ID NO: 10141 - DNA, 423 bp, Triticum aestivum
  Clone ID: LIB31-047-Q1-E1-E12
ggtccgaggctcccgggtcgacttcaaccaaagcgaaatccaccatctcatcgaaagacgggacacctttgcctctatcaagtggtatcagatttccaggttgctcggtgagattttacagtttttcgtagtttagatcgagtctgttcttcatacctatagtccacgaaaaagccaggaaaaaattagggttagttcatcccatccggagcaatctgagccttgcataatcttttcggtatttgctttgttgaatttgcggttgcatcgtcgtgttcagttgctggtcttagcgtctagtcttttagagtttcgagttctgttcacaagttgtcacgccgtcggtgcaccatcatcatcgcccctgccatctaccaccagcgctctgaatccgtatccatataccaccagcaatccgtggtc

SEQ ID NO: 10142 - DNA, 430 bp, Triticum aestivum
  Clone ID: LIB31-047-Q1-E1-E9
cgggtcgacgttgataagggtggtcgttacgccggatcaaacacgtgcaaatactgtataccgcaacacacagacacacaccgtacaccatgactgtgccacacgtacatacatgcaagcatacctgttcgaccagcggtacatggtcgtccgcatgtggagagtaccgacgaggataagcgcgttccagacggtcatcgatgtcgatgtccgccgtacgctgaccggcaggccttaagtctccgtgcgtactgtacctaagctggctcgtcgtcgtacacgacacgtcgatcatttcatacgtgcgttagaaacaacgcatactgttcaaccgtggagacaatgtcgatcgggatctggatggatgtgcactgtggcgaacaaccaaccagactgcatctttctgatggccgtatgcatctttctgatg

SEQ ID NO: 10143 - DNA, 322 bp, Triticum aestivum
  Clone ID: LIB31-047-Q1-E1-F10
gcctgccggtaccggtccaggattcccgggtcgaccgaaccggtgcacgaggtgatgcacgtcatccacgtcgcattgctgtgcacggtcgagcacagcatgcagcgctcgacgatgcgggaggtcgtgcagatcctcagtgagctcccagggccagctggtaatcaacgtgacgaagatgagcttcacctcgccggctaacgccctgagtccaaccctcctgcctcagatatttctacagaaacaccaactggcaatccgatagatcagcaaccgcagcagcagcacactagctcggagtcgtcgcttcatcctgatctca

SEQ ID NO: 10144 - DNA, 443 bp, Triticum aestivum
  Clone ID: LIB31-047-Q1-E1-F9
gtaccggtccggaattcccgggtcgacaagacgacagaagggggtttctgctcttacgcttttggcttagggttgatggtgcgctgatgagattgagggatacccgtttacattgttcttttggaagtaaggaagcaaacccggttgtactgcgtgaactttgctggagagaagcaacatttgctgccatgtctgcggaggggtatccttccgattctgcggcatacgcagacccgaatcttgtcgcccgcaagctgcccgtggtgatgcagaagacccagaagctgaagatacccagttaacctgctaagacacctctaccgtgtgttcggtacatccatgagtggtcaaccgtggtcacaactctatttgcatgtgttgtagatgtgagctatcgttgctttacccatttatcttgaggcccttgcgactggcaagtaatg

SEQ ID NO: 10145 - DNA, 375 bp, Triticum aestivum
  Clone ID: LIB31-001-Q1-E1-A12
aattcccgggctcgacaacctcattagagccgccgcagtttttccatcatggcactgctccgttaagaatacagcattcctcaaatcattccgtcagagggcttcaaacgggatcctggcgctacattatgcgaggcagtggatggggacaaagctacagagaactctatcgctggatatgagatcaaccagtccaggatgattcttttttatgaagttttgggattagccaagaacatctgggaactccctgcaaaattcaagatttgccacactgattgttgacaggtgggccaagaaatttggcaagattatcgctatcaacaattcaacatggacacaatcaacaaatccgaaaggggggggggcatctgc

SEQ ID NO: 10146 - DNA, 422 bp, Triticum aestivum
  Clone ID: LIB31-001-Q1-E1-A3
ccgggccgacctcgagccaaatgcacatgtcaagcaggcgatgaatgagatcaatgcagctgcaaggatgagggtggctgcaaacgagaaggcggaggctgagaagattgtccagatcaagcgtgccgagggtgaagcagaggccaagtacctgtctggcctcggtatcgcccgccagcgccaggccattgtggatggcctgagggacagcgtcctgggcttctcagtcaatgtgcctggcaccactgcaaaggatgtgatggacatggtgctgatcacccagtacttcgatactatgaaagagattggcgcgtcctccaagtcctcggcggtgttcatcccccatggccctggtgcggtgcgcgacatcgccacgcagattcgtggacgtcttcttcaagggcagtctgcctctgacaact

SEQ ID NO: 10147 - DNA, 170 bp, Triticum aestivum
  Clone ID: LIB31-001-Q1-E1-A4
tgcagccacggtctagctagccgggtcgaccgtgtcacgctgtaaggtgaactccagcacatctcctgcgacgacatcgccttgcagattctggaggatgttgacaacgtcgccgcatgagaggcctcccggctcgatgtgatagacaccaggagcgaatgccgggtctg

SEQ ID NO: 10148 - DNA, 432 bp, Triticum aestivum
  unsure at all n locations
  Clone ID: LIB31-001-Q1-E1-A5
aattcccgggccgacatgatatgcaccggatttaggtccggagcggctgcaggggtggtgtcccgaatactgtccgacaacagatttaagtcatgctcatcgcggctgttcggcactcctgatgtgggcccgaatccgttgaagatcaagtctccgcggatatcgttcgtgtaattcaagtttccaaacctgacctaatggccaggggcgtagctgtcgatctactccagatggccaagcgaattggcccgcagtgcgaagccgccgaacacgaaaatctgtccggggagaaaagtctcaccctagaccgcattgttgaagattgaaggggccatcaagccttatagcaatgacacagaggaactctcaatgaaagcaccaatgtcggtgtcaaaaacggcggatcttgggtanggggtcccgaactgtgcg

SEQ ID NO: 10149 - DNA, 401 bp, Triticum aestivum
  Clone ID: LIB31-001-Q1-E1-A6
ccggttttgacaccacggcgtggagcttcatttccgactgaggggtagaagggggatttcgcgtgtctgggctgcgggagcgatttcggatgaggagggagttctcgcgcgcgtccaaattttgggataacaaggcgcgacgcgggttgaagaagcgggagtttcaaagcaggtgagacaaaagatactcgagcttgaaaatttcgggataacaaggtgcggattccttgttcggcagaacaaacttaacgtgtaaaaaaaatcatacaagacacaagagagtcatgtccccctttactatattgctatagatgccattgaaaaaactacaagaaaaatgtaaaaaaaaattgggagaacatgattaacctgcacagtaccaaatccaatcccacttcccc

SEQ ID NO: 10150 - DNA, 403 bp, Triticum aestivum
  Clone ID: LIB31-001-Q1-E1-B1
ctggccaaatgaacggtcaaccgttgacttttgacaaaaaaatcatagaaaatcctgaatttaaaacagttcatgacatttgaaagaaagtccagaaacttcaaaaaagttcatgaagttgaaaaagttaattgattttgaaaaaaatccaacacaactaaaagaaataattcatcaattttgaaaaaaagtaagttcatctgttttggaaaaaattaaatcaaaaatgaagaaagagttcatcgattttgaaaaatgttcatcgaatttggaaaaagtttatcgattttgaaaaaagagtgtgtctatagtgaaaaaagttcatcggtttttaaaaaattagttgatttaagaaaagaattcaatcggttttttaaaaaattagttgattttaagaaaagag

SEQ ID NO: 10151 - DNA, 353 bp, Triticum aestivum
  Clone ID: LIB31-001-Q1-E1-B2
ccgggcgaggcagacgacagaagggaagcctcactggcaagaccatcaccctggaggttgagtcctcagacaccattgacaatgtgaaggccaagatccaggacgaggagggcattcccccggaccagcagcggcgcatcctcgccggcaagcagcttgaggatggccgcacccttgcgggctacaacatccagaaggagtccacccttcacttggtgctccgcctgcgtggtggccagtaagctcctggcgatggatctctgattctgtcttcggtgtccttcaatggagtctcgtcttgtgcctatcattgcctgatttggccttgtttctgtaccgtgactgtgatgcag

SEQ ID NO: 10152 - DNA, 435 bp, Triticum aestivum
  Clone ID: LIB31-001-Q1-E1-B3
cgacagaaagggagtgtagtgcgtggttttgatgacttgtagatttttgcaaaacgtatgtgggttctttatgactaatgttgagttcatggattatacgcactctcacccttccagcagtgctagcctctcttgtgccgcacaactttcgccggtaccataaacccatcatttatcttcctcagaacagccaccatacctacctattatggcatttccatagccattccgagatatattgccatgcaactttccaccgttccgtttattatgacaggcttcatcatactcatattgctttgcataatcaagtagttgacatcgtatttgtgtcatggcctccattcataattttttatacatgtcactcttgattcattgcacatcccgatacaaggctgggagcattcacagagcgtccatattttgtttcaa

SEQ ID NO: 10153 - DNA, 307 bp, Triticum aestivum
  Clone ID: LIB31-001-Q1-E1-B4
tgatgacaggaattggtcattcacatggttagtcataaaatcctacataaaacttgtagatcactgaatatgatatgtttgattccttgcaatagttttgcgatataaaggtggtgatattagagttgtgctagttgagtaattgtgaaattgatcattacttgtgttgaggtttacaagtcacgtagcatgcacgtatggtgaaccattatgtaacgaagttggcgcatgaggtgctctttgattgctttccttatgaatggcagtcgaagacaagcgatggtcttttcctaccaatctatccctc

SEQ ID NO: 10154 - DNA, 404 bp, Triticum aestivum
  unsure at all n locations
  Clone ID: LIB31-001-Q1-E1-B5
gaaaatgatgatgaacttgtgcctggtgactcgaagccaaaactggacctgcagagtgataataagaaaggaattcaagtgcagctcaacctgaagagcaatggcaacgggtcgagcgcaaagaaggcgccagcagcaagatcaaaagctcctgggtctgcagggaaggctgtcggaggctcaggcgggaagcggaagaggtagcctaccgccgccgcacaatgatgactggctggaagcaacagaccccagatagttggtggtctcgtgtttggtttctcctgttaccccagttgttcncatttgtagggaaaacctgtttgcttgcacttcatttgctcttgtgtttctcgccgctgccggaggggcttgtttagcgtgtgagctttttctcctgacgcaat

SEQ ID NO: 10155 - DNA, 377 bp, Triticum aestivum
  Clone ID: LIB31-001-Q1-E1-B8
gagactttcaagccggcgatagaacaagatatgggcagtgctgaggaggcgtatgccgggaccaagtcatgggcgcctaacaacggcatcctcatcagtgggtgccaaaccagccagacatcagcagatgcaaccataccggggggtacgtcctttggcgcgatgagcaatgccatccaggccattctcgcgagcgatgatggaaagataacaaacaaggatctcgtcatgaaagcgcgtgcagcgctgtccaagcaaggatacactcagcagcctgggctctactgcagtgatgagcatgttcatgtggctttcatctgctgaaacatggattgatgttgtgcttttttttcctttctgtgatgagctgtgcacga

SEQ ID NO: 10156 - DNA, 346 bp, Triticum aestivum
  Clone ID: LIB31-001-Q1-E1-B9
gactcactcagaatatcggagaggtatctctaagccctctcggtaatacacatcataagaagccttgcaagcaaagtgactaaggagttagttgcaagatgatgtattacagaacgagtaaagagacttgccggtaacgagattgaactaggtatgaagattaccgacgatcaaatctcgggtaagtaacataccgattaacaaagggaattatgtatgttgtcataaggttcgaccgatagagatcttcgtagaatatgtaggagccaatatgggaattatgtatgttgtcataaaggtacgctatttgttattgaccggagaggtgtctcagtcatgtctacat

SEQ ID NO: 10157 - DNA, 358 bp, Triticum aestivum
  Clone ID: LIB31-001-Q1-E1-C1
cgggccgacctgaaggccaacaaaaagaagattaaggccgctgtcaagaaaatgtacgacattcaggccaagaaggttaacaccctcatcaggcctgatggcaagaagaaggcgtacgtgaagctgacaccagactacgatgctcttgatgtggccaacaagatcggcatcatataagtcagagggagggtcctgcagtaggcgcttgtgtcgtggtttcttgtgttattggaattttgtagttgttacttagcaaaggggctcagtggctccattgcctaccatatcgctgcacactttcatgaatttgatgcaatcgaagtgacttgttgttgagctttgcgtttggtcttaaaaa

SEQ ID NO: 10158 - DNA, 366 bp, Triticum aestivum
  Clone ID: LIB31-001-Q1-E1-C2
ccgggtcgactcgccgacttagaaagagcaaacctagtcacgctacaacacatacacgtggtcgatccttgggtggtagagcacaagacctttattaagaaggcgtacaatgaccgatgccaagcagaggacggacgttctgctgcgtcaagcagccacctggcggtcagaagggtgcctactacgccatccatcacatgctggcgatcgtacgggaccatcatcaacttctgctaccgagtacactcacagattgggccgcgagcgtgttggcaatccaagacccggacatcagacaacaattctttcgcatcgagtcggagtttgcggaaatcatccatcaagatgtccttcgtacctcggggc

SEQ ID NO: 10159 - DNA, 385 bp, Triticum aestivum
  Clone ID: LIB31-001-Q1-E1-C3
atggaaagggtcagagttgaaggtgccggtggttgtttgcgcaagcacattagcactcgtgtcaccttttgttgtcagaatggcaaaacttagttagcatagtgtttcaggtgtttcaattaatagtgtgtcatttttttgaggtactgatgctctcatgttgtaagcgctcaccgtgattaggtttctttgatggcggggcagagttgcagagtgctccaactgaaagatcccttggtcgccgtctcgtgtactggactatatccttcgtcactttaggtaactacgggtacgggaatggtatggcgttggaggacacgtcaatcgcccacgatcacctgtcagaacacagcagcagtacattttagacgtaatgctatgtgta

SEQ ID NO: 10160 - DNA, 406 bp, Triticum aestivum
  Clone ID: LIB31-001-Q1-E1-C8
aagcgtgggtttgttgcatccaactctaagggtgaccctgccaaggaggcaaccaacttcacctctcaggtcatcatcatgaaccaccctggtcagatcggcaacggctacgccccagtgctggactgccacacctcccacattgctgtcaagtttgctgagctggtgaccaagattgacaggcgatctggtaaggagattgaggctgcgcccaagttcctgaagaacggtgacgctggtattgtgaagatgattcccaccaagcccatggttgtggagaccttcgccacctacccacctcttggccgcttcgctgtgcgtgacatgagacaaacgggtgctgttggtgtcatcaacggcgttgagaagaaggaccccaccggcgccaacgttaccaaggctgcca

SEQ ID NO: 10161 - DNA, 396 bp, Triticum aestivum
  Clone ID: LIB31-001-Q1-E1-D1
agcacggtctagaattccgggccgacatcgagccaaatgcacatgtcaagcaggcgatgaatgagatcaatgcagctgcaaggatgagggtggctgcaaacgagaaggcggaggctgagaagattgtccagatcaagcgtgccgagggtgaagcagaggccaagtacctgtctggcctcggtatcgcccgccagcgccaggccattgtggatggcctgagggacagcgtcctgggcttctcagtcaatgtgcctggcaccactgcaaaggacgtgatggacatggtgctgatcacccagtactttgatactatgaaagaggtcggcgcgtcctccaagtcctcggcggtgttcatcccccatggccctggtgcggtgcgtgacatcgccacgcaga

SEQ ID NO: 10162 - DNA, 377 bp, Triticum aestivum
  Clone ID: LIB31-001-Q1-E1-D2
cgggtcgacaggacgttaaccaactttgagagccaatctgaaaccattctctcaagcattcacatacaagcagctttgcattacatccacaattaatcttgtagctagagctgcgacaattaatttggatcgagagcacagattcacgtgaaattcaatcagatgttagtatcaaagaaaattagtaagtgaaagtgctaaaagaaacataacataacaatggggaaaaccggtgcgcgtaactcctgattgcacaggttccgggtaaccgtccgaccaatttgggtctcttgtacgcagtctttccctacatttcagcaaggctgtttccaagaacgaaagccgtgacgcacgggcacaagggaacaactctacag

SEQ ID NO: 10163 - DNA, 381 bp, Triticum aestivum
  Clone ID: LIB31-001-Q1-E1-D3
agtgaagagaaaaaaaagccatacggaactcaaaatattttccggagatattcattttcctgaagaggcggataatatattacgtggctgtttgataccgccagaaagacaagcaaaagattctaaggaatcaaaagaaggaaaaattgggtctatgttcaacggaaaaacattctcaagagcaaggaaaagtattttgtttccgttcgccctacagtggcatatgaaatggacgaatgaagaaatttatcaacacttttcccgcatgatctcttgcaggaagaaaataatctccagattcgacttgtcaattttatttctcaagacaatagcaagttaactcaaagaatttatcacacaaacagtcaatttgttagaact

SEQ ID NO: 10164 - DNA, 375 bp, Triticum aestivum
  Clone ID: LIB31-001-Q1-E1-D4
cgggccgactctcctagggtttcaggaatattggggtatttatatagcagataagcagttcaaggggcacccaagatgggcacaaaccaccattgcgcgccctgctgggtgttgccctcctcgacgaatgggcaggtacaaccttggtcgactggatgtcggtctggacaacaaagtcctcaggaattttcactatgtttggacgccgtttggaattgatttcctgcgagtgtaaagacatgcatactccaccaactggcattgagcagtatgtgaataggttccgactaaagaatgttattgaatgactataaaatggttgtgccacatccaagaatgatgatattgcatcatggtataatcaataattataca

SEQ ID NO: 10165 - DNA, 377 bp, Triticum aestivum
  Clone ID: LIB31-001-Q1-E1-D7
attcccgggcagacccttcaaatgactatcaggcggaggatgggaagatgggaaaggttgatctggatcggtcgcctagtctgcaggagcaggatgacaagtctgctccatatagtcctgtgtataatggcgaaggaggcagggggtcaatgagccctaatggcgagccagtggtggatgctaaacctgtggaagtctttgtgagcagcaagaagagggaggatgaagaggaaggtatgatagatgaatacggagaggagggtatgatagccgatgatgaccctcgcgcaattgcagctgtgcagaacggtgatgataagtgacaacgctttgaacgatgaatttgctatttcaacaacaatccatgttaaattttt

SEQ ID NO: 10166 - DNA, 322 bp, Triticum aestivum
  Clone ID: LIB31-001-Q1-E1-E1
ccgggccgaccaagccagagaccaaaatggcttgccgctgcacaggtaagcttccggtcaatggggtatccatccgtctcttcgtggctgggtgaagctttccgcaagatgtcatggcgcttctccatgcatcgcggccatccgctggtttctccagggtgcccgtcaaccgtcctccagccagtactgaattttgaagtccgtcatgagcttgatgtcatggggttttcatcatcttgactctcgcatctcacttatgaatcactcaaccaaccccgtctaccagcatattacaataaactacatcgtcccgggcatctgt

SEQ ID NO: 10167 - DNA, 436 bp, Triticum aestivum
  Clone ID: LIB31-001-Q1-E1-E11
ggtacctatcaggaattgacggctcgacgacgaaagaagggcatataacttgtgtctcttgcttcttaagattattgcctggtatggtgtaataaattcagagattgcctttgcagtggtctgtagctacaaagatgattatttagaagaacatagatgatgactaactattgagaagcataataatgtttttatttcttcttcatgacaatcaaggtcaaacaaatatcttcatgtttatcagaatgaaataaaattgatggacagtgccactccattgataactagagctagcagtgtgtttcatctagatggttacattttcttcatagaagaatgtacaatgctagaattagtagacgcgagacagtcaagatcttcatgcactcaacactcgttgtactgagttttttaacaatactcattgtaatatgtg

SEQ ID NO: 10168 - DNA, 344 bp, Triticum aestivum
  Clone ID: LIB31-001-Q1-E1-E2
cgggccgactgtagtatcaaagcattgaacactgcctcctgtctgcgagtatcatggtatgacttgttgtaccgtatgtacgaccacgtgtatctatctatgtaccacaacacatgtagcgtgtgtgtggttatgtgcaccgcaatagcatatgtctgtaacctaccgtgtcgtgtccgttgtctgtatcgatatcacttgtgatctacactaaggccaagatctgggcatcgcaccacttcttgtcagtgtagtcaacctcatgattcatccgacaacgttaaccacattggatcgtgagactataggactcatgggaagtcctgaccggagtgcctgaaaac

SEQ ID NO: 10169 - DNA, 410 bp, Triticum aestivum
  Clone ID: LIB31-001-Q1-E1-E3
cggtctagctatcccgggccgaccgcatcaaacaagatccagatataatgttcatgctcaacgctggcaccaaataacaattatttaggtctaatattaatcctgaaggtagatgtagaggtagcgtgccgaccgcgatcacatcgactttggaaccatttcctacgcgcatcgtcacctcgtccctccccagttgttgcttggttcatttccattgttgagaacttgagattaattgccattataggatgtgttcatggagaagttgcatgttgcttaatctatggatccacggtccactatttttcgtcttgcgagaaattcatgggctattcttgtttgatgtgttgttcttcttaaactttgctcttgtattgatgatggtgtaatattactaaatattattgatg

SEQ ID NO: 10170 - DNA, 111 bp, Triticum aestivum
  Clone ID: LIB31-001-Q1-E1-E5
ttccgggccgaccctcacatcatcaatgcataactttccaatcacttctctttttgaaaaaacctttttaggcatgaaaggcaagtattttttttgtattttcattctttt

SEQ ID NO: 10171 - DNA, 348 bp, Triticum aestivum
  unsure at all n locations
  Clone ID: LIB31-001-Q1-E1-E8
acttccatgtgaatgggaaaaagaaaatacaaaaactataaaataaaataaagttaaataataaaattcctcatattatgcgtgtttcgatctcattgccacacaagtctcgtcacagttgcggacgcgttttaccccttgagttgcacgtagcttcggatgcatgcaattgcatacgttttgcaccttcgtagttgcatggattccgataattctagttgtacgtaagtgaaacaagagtttttgtgacaaataaaaagaaaaggcaacaatttttctgtcaactgacgtaggaaaaatagggcatatcaacactacganaatatattcctggataatacatgactg

SEQ ID NO: 10172 - DNA, 343 bp, Triticum aestivum
  Clone ID: LIB31-001-Q1-E1-E9
attcgcgggccgaccccttctacatgcatgccaagatcttgggcagcgctggggaccgacaagtcgcgagttcttacctcgaaggcgtcattctggcaaaccaagataaggataacttcctcgtgccttactttcccgagtaagtcctcccctcaaccggcccgtaacatatgaattcttacatttcgatcgtttttcttttaacataccgtgtgttctgcagtgacacacgttgcacgctcatcctcctaagccccaaatattccactgggacgtatttcgacccggagcgtcagtcgtacgtagactacacaaatgtcaagaaggttcttgatgatgttct

SEQ ID NO: 10173 - DNA, 257 bp, Triticum aestivum
  Clone ID: LIB31-001-Q1-E1-F12
gtacgtcatgtatgagggcccggtgcgacaatccggtggcactgctaaccctttagagtttgaccccgggatctagccctttgactttgcatacaccgggtcccatacacacggtaaactaaaaatctaaaaaaacgtaataatcgaatttattaaaaactctggtattcatcatggagaggtccatcggtcaaactacgtccagcgaaagtcaaagggatagacccgacggttgtctatgtcagggttagacggga

SEQ ID NO: 10174 - DNA, 408 bp, Triticum aestivum
  Clone ID: LIB31-001-Q1-E1-F2
gggccgactgtcctttcagatattacgaggagaagataattgccctggccttgtggttctttcaaagttaaaactgagcattgagttatgggggaggaagtcaaacagtgatggtattgtctcatgggtgctgcagaaatgtgttcaactggacgagctcttttcaagacccgcgcgcaggaaaaatgtcatcctgttggcggggtatgatgaggacacaaatgcgatatttctgtcttcggattctcatgatttcatcctccagctcgagtcggtgcagttcagatatattggaaggagagaatgcacacacttcagaatgtattatccgtatacaaatttctacattgcagagaggccacgtgagtctaggattaaggaacagtgagttgcatttctctcgtggca

SEQ ID NO: 10175 - DNA, 415 bp, Triticum aestivum
  Clone ID: LIB31-001-Q1-E1-F3
ggtctagctatcccgggtcgacatttctttaaattccttaatagggttcgattgttcaccttgatggattggcctatcttggatgctatctgtgataaattaagacaaaacttatatatcagtggaagtgacattctttatcaaggtggccctgttgacaaaatgatcttcatagtgagaggcaagctagaaagcatcagtgcagatggaagcagggctccgttacaagatggagatgtatgtggagaggaactcctcacatggtacttggaacactcttcaacaaataaagatggcgggaaaagtagatttcatggtatgcgtttggttgctatacgtaccgtgcgatgcttaacgaatgttgaagcttttgtacttcgagcaagtgatcttgaacaagttactggacaatttg

SEQ ID NO: 10176 - DNA, 238 bp, Triticum aestivum
  Clone ID: LIB31-001-Q1-E1-F5
gccgacgacgaaacctactacaccggcggtgcctactactacgtgcagcccgctgaccacgaccaagagtagttaggacgatcccagccacgaggcctgcgcctcgttcgatctgtctccgagtttgtgctactcatcttatcggaacttgcgtaacttaagtctgtcctcagatattcttgcttccgcggactcgtccacgatcgagcacttctattcgatgccccgaggaccctgg

SEQ ID NO: 10177 - DNA, 410 bp, Triticum aestivum
  Clone ID: LIB31-001-Q1-E1-F9
gacccctttatcagtctcggtttcgagggaaacacgagttgccagatctcccggatccgccccttccccgacccgaatcgcgcggagatggacgccggcggcgccgacctgaggagcagcatcaagaagtggaagatcatctacccggtgtacctcaactccaagaagacggtggccgagggccgccgcatcgccgccgccaaggcctgccccgaccccacctgcatcgagatcgccgacagctgcgcctacctcaagatccctcgcgccattgagttggataaggcatacccgcgggatttcttccaggtggggaaggtgagggtgcagctcaccaatgatgacggctcccagtcaaccctgcaatcacaacaaagaagcagctaatgatcaaatagcagagctggtcc

SEQ ID NO: 10178 - DNA, 422 bp, Triticum aestivum
  Clone ID: LIB31-001-Q1-E1-G2
cccgggccgacgagtggaggagtgtcttccccaacgaccccgacaacgacactagcccggacccggcatgcggcacaccgtacgtgacgaggaaggattggctcgacctccacttcgaccgaaagtagtttagcttagtttaaatttatgttttatgttcggttatgcaaaactatctatgtttaggtttgaatgcatactacttttcgttgaaccttctttgaacttgatcaaattaaagtttacaacattaagtttaggggatcgaccagaaatggccaaaaattgctggtatatatatatataatagagagagagagagagagagagggagagagtagcactattctgatcccgggatcagaatagttatttggatcacgatcagcctaaataggttccgacgggcatgttcccgaact

SEQ ID NO: 10179 - DNA, 409 bp, Triticum aestivum
  Clone ID: LIB31-001-Q1-E1-G3
ccgggtcgaccaccactggcaacctgatctacaagcttggaggcattgacaagcgtgtcatcgagaggttcgagaaggaagccgctgagatgaacaagaggtctttcaagtacgcgtgggtgcttgacaagctcaaggccgagcgtgagagaggtatcaccatcgatattgctctctggaagttcgagaccaccaagtactactgcaccgtcattgatgcccctggtcaccgtgacttcatcaagaacatgatcaccggtacctcccaggctgactgtgctgttctcatcatcgactccaccactggtggttttgaggctggtatctccaaggatgggcagacacgtgagcacgccctccttgctttcactcttggagtgaagcagatgatctgctgctgcaacaagat

SEQ ID NO: 10180 - DNA, 378 bp, Triticum aestivum
  Clone ID: LIB31-001-Q1-E1-G4
gttaaggaggtctcttcgtacctgaagaaggtcggctacaaccctgacaaggttcccttcgtccccatctctgggtttgagggtgacaacatgattgagaggtccaccaaccttgactggtacaagggcccaaccctgcttgaggcgcttgaccagatcaacgagcccaagaggccctcagacaagcccctccgtcttcccctccaggacgtttacaagattggtggcattggaactgtgcctgttggccgtgttgagactggtgtcatcaagcctggtatggttgtcacctttggtcccactggtctgacaactgaagtcaaatccgttgagatgcaccatgagtctctcctggaagcgcttcctggtgacaatgtt

SEQ ID NO: 10181 - DNA, 417 bp, Triticum aestivum
  Clone ID: LIB31-001-Q1-E1-G7
attcccgggcagaccctccaactaatcctcaggctccgcggaggcatcatcgagccatccctgcaggctcttgcccgcaagtacaaccaggagaagatgatctgccgcaaatgctacgcgcgcctgcacccaagggctgtcaactgccgcaagaagaagtgtggccacagcaaccagctgaggcccaagaagaagatcaagaactagagtgctactagtcagtttcatggaccggttgaatccattgctgtgttagcgtttatgctattgtcgtctcgttgtcgttgaaccttattttactttgctttcagcctccaatcgttgtggtgatgataattgacagtattggtatatggtagcaaacctataattttgccaaaaaacagatggtcagacaaaaaaaaaagcggccgctct

SEQ ID NO: 10182 - DNA, 347 bp, Triticum aestivum
  Clone ID: LIB31-001-Q1-E1-G8
acgcgaaaacgacagaaggggaaagaaaaaaactcgtacggagtacgaaagaataaaataataaatgtctttgacatccaattataccactgaaatttttttttcatttttgaatggcagttccaaaaaaacgtacttctatctcgaaaaagcgtattcgtaaaaaaatttggaaaaggaagggatattggacatcgttgaaagctttttcattagggaaatcactttctacaggtaattcaaaaagtttttttgtacagcataataaataaaatacactataataattagaattagcctaacttaaaaaccaatttgtttaaatacatctaaaaaaaataggaagc

SEQ ID NO: 10183 - DNA, 443 bp, Triticum aestivum
  Clone ID: LIB31-001-Q1-E1-H1
ccgggccgaccacgaacgtaagtcatttcctaccaatctatccccctaggagcatgcacgtagtactttgtttcgatgactaatagaattttgcaataagtatgtgagttctttatgactaatgttgagtccatggattatacgcactctcacctttccgccattgctagcctctcttgtaccgcgcaactttttccggtaccataaacccaccacatatccttcctcaaaacagcctcaaaacaaccaccatacctacctattatggcatttccatagccattccgagatatattgccatgcaactttccaccgttccgtgtattatgacatgcatcatcattgtcatattgctttgcatgatcatgtagttgacatcgtatttgtggcatagccaccgttcatcatttgttatacatgtcgctcttccatcaatgcacatc

SEQ ID NO: 10184 - DNA, 387 bp, Triticum aestivum
  Clone ID: LIB31-001-Q1-E1-H11
gtacagatagtaaatctggaaactgatttgatggcgcgcattggatcgtgcatacctcgttccagagctccatgagttccatgaagtagaacttctccttgaagtagcgcttgatgatggcctggacgtgacatttcagcagcacgccatcgtttatcgcagacaggccaacctgacgggacaccaccaacggcgctatgttgttactaatccatctcatctcacgagatgtactttctactgcggatcggcggtgaagtgaaagtactcacggtgggcagcttgtaccagcagaggttgtcgcgcctcgtgtaggcgttgtccgtgatgtcatccatcaccagcgcagacgcctggagctgcacattcagagacagaagtcgatgt

SEQ ID NO: 10185 - DNA, 418 bp, Triticum aestivum
  Clone ID: LIB31-001-Q1-E1-H12
gacagaacgacaaaagggtgaggagcacaagaagaaggtggagtcgaagaacgccctggagaactactcgtacaacatgcgcaacaccatcaaggatgagaagatcgcctccaagctgccggcggacgacaagaagaagatcgaggacgccattgacgctgccatccagtggctggacacaaaccagctcgctgaggcggatgagttcgaggacaagatgaaggagctggaggctctgtgcaaccccatcatcgccaagatgtaccagggtgctggtgccgacatggagggcggcatggacgatgacaccccggctgcttccggcggtgctggccccaagatcgaggaagttgactaaacgagttgatgttctgttgcagaggcggtgaagcctgcttcttagttattatgtgtgttc

SEQ ID NO: 10186 - DNA, 269 bp, Triticum aestivum
  Clone ID: LIB31-001-Q1-E1-H3
cgggccgcccggctgcgaaacgagacagaagggggaaagaaacaagagggtggtcaggttccttgtcgagaacggcgcattcctgccccctgacctgaacgaccacaggttcaacccacccctccactacggctctgggctggagtgggcgtacgagatgaagcgcatgcatgacgagagtgactcgggcggctaagcttccttaagctcatccagctactgaaaagtgatctatccgcaggggattctgccgatctttgggttatgac

SEQ ID NO: 10187 - DNA, 291 bp, Triticum aestivum
  Clone ID: LIB31-001-Q1-E1-H4
gccgaccgtgatggccagataaactatgaggagtttgtcaaggtcatgatggccaaatgagcacccaaccgtgctcccaagacaggaggagaattgtgcattgcatattagtttaagatgcaacgcttatttgatcgatttccagttaagcatcctacctagctgtagctgctaaaacggatcggacgacgcaattcctgctatgttctccagtgtgtttccagacctcttgtgttttatgtgaacttgtgtcctccctggtgtatcctgaataaagcacgcacactgcag

SEQ ID NO: 10188 - DNA, 414 bp, Triticum aestivum
  unsure at all n locations
  Clone ID: LIB31-001-Q1-E1-H5
gggccgacaacctcaacaatacacacatccaggtgaaccaagcccaaaagcagaggcgccgtacataccgtgctcacggacgcatcaatccttacatgtccaacccctgccacattgagctgatcttgtcagagaaggaagagcctgtgaagaaggaggctgataacgtcgtcgcaccaaggaaagctatctaagctaccggaatggatgcattcgtccaacagtcttagttgtagttcttctcaagtacctttgttggcagtgtntgttgcctccttgatgtntttgttaccaacattgagtaaggatttgttaaggttgatgctatccttgtgattgcgagtggtctttatatgctaaaacagtttcagatagttgagcattagcacaccagaacctatttctcagagatgc

SEQ ID NO: 10189 - DNA, 438 bp, Triticum aestivum
  Clone ID: LIB31-001-Q1-E1-H8
attcccgggccgacttccaccaaagcgatatccatcatctcatcgaaagacgggacacctttgcctctatcaagtggtatcagatttccaggttgctcggtgagattttacagtttttcgtagtttagatcgagtctgttcttcatacctacagtccacgaaaaagccacaaaaaaaaattagggttagttcatcatatccgaaccaatctgagcctttgcataatctttttagggttttgctttgttgaatttgcggttgcatcgtcgtgtctagttgctggtcttagagtctagtcttttagagtttcgagttctggtcataagttgtcacgccgccgccgcaccatcatcatcgcccctgccatctaccaccaccgcttatccgccaccgctccgaatccgtatccatataccaccaccaatccgtgtccatata

SEQ ID NO: 10190 - DNA, 397 bp, Triticum aestivum
  unsure at all n locations
  Clone ID: LIB31-002-Q1-E1-A1
cgaattaaagaagtttccgcattcactccattgtggaacaccagaagttacttactctgcaaattttccaatcccgattcggacatgcacattacacgcattcacacctagggaaaggaacccttaacagaactattctctctggtagatgtttcctacataatctctccctaataataaagcacggattgactttgtcgggttcaccgtcacaatactcttcttcccgtgaatttacactttcagttcanatttannacatattcaaggtggtactaattttttgctaattcctggtttcgtctgctcctacgtctatgtcgccccgtacgtcctaaatcgggcttgtccagcctacnaacaaagtgggccgtatgttcnnttgcgctgcaccttt

SEQ ID NO: 10191 - DNA, 414 bp, Triticum aestivum
  Clone ID: LIB31-002-Q1-E1-A11
cccgggccgcccttcccactatgcaaggtattccaacatgtggaagccgcagtcgtgcctaaacaagaaaagagtcaggttaactcacaagaacatatagaaaaaaaatcataacttcaattcagaggtgacaaaaaagagagggtgagcattggtttggaggacacatgaggaaaagatgggaaaataccggtttccttgcttcatagtcgccacgtactcaattggaaaatgtctgatctggacctttgagttttcatagtgacggttccatgtctctttgaggttgttgatgaagtattcaccatgcgtagtaaggtctgcatcagcttctgaacgcattgaatcaagcacctcaaaacgttggttcttcaagtcaaggcagatcgcatagtggtgaacacacttgtcgtg

SEQ ID NO: 10192 - DNA, 406 bp, Triticum aestivum
  Clone ID: LIB31-002-Q1-E1-A3
gatatactcttgataacttaaagggcattagtcccacgctatgtcagcacaaaattaatatggaacatgatgctaaaccagttgttgatcaccaacgtcggttaaatccgaagatgaaagaggtgctaagaacagaaatattaaaacttctaaaagaaggtataatctatcctatagttgatagtagatgggtaagtcatgttcattgtgtccctaagaaaggaggtattactgttgttcctaatgataagaatgaattcattccacaaagaattgttacaggctatagaatggtaattgattttagaaaattaaataaagcaactaggaaagatcaatacgctttgccttttattgatcaaatgcttgaaagattatctaagcacacacacttttgctgccttga

SEQ ID NO: 10193 - DNA, 455 bp, Triticum aestivum
  unsure at all n locations
  Clone ID: LIB31-002-Q1-E1-A4
cggtccagntatcccgggtcgactacatcaacacatgcagtgcgtttggtcctcggatgtggctcactattgagggtgatgttgttcacttgcacacattgtggaagtgtgtttttttagcaaaatgacaaaaaagtaatgcggttcatttcaatatatattgtggttcacttgccctcgtctctgcggtccactctcactcataaaaaatgttgaaaaaaatacaacaaaaactcgtgtgagaaaaattacgtccaacaaaggaaaccatgaagttcacttgactgtctgatgcggtgcgactttttaatctaaagcagtgcgttcctttgtctgatgtggtacatacgacgattttgggtcgccaaaaaatagagtgtccatatttcgttaaaatcaaaattgctcttaaaccgtaaggaagttcgcttcttatcagatgtagttcactcgct

SEQ ID NO: 10194 - DNA, 443 bp, Triticum aestivum
  unsure at all n locations
  Clone ID: LIB31-002-Q1-E1-A5
aattgncgggtcgacgtgtatagctatgggattgtgctgtgggagctcatgaccggcatgctccccttcacaaacatgacagcagttcaggccgcttttgccgtggtaaacaagaacgcccgccctgcaatcccgcaagattgcctgcctgctctgagccacatcatgacgcgctgctgggatgcaaaccctgaagtccgcccgtcattcaacgaggtcgtcaccatgctcgaggctgccgagacggacgtcgttagcaacgtccgtaaggcacggttccgctgctgcatctccgagcccatgaccaccgactgagactagtgccaggatacagagtaccagaaaatgaaaaaatgggaagaagaacgaggatgggaaaggaggcgacacaatctcgatgtacagaccacactgatacacctgngcgttgcgtgtgcctgcct

SEQ ID NO: 10195 - DNA, 405 bp, Triticum aestivum
  unsure at all n locations
  Clone ID: LIB31-002-Q1-E1-A7
tcactgcccgtgaaagagcttaagtaaattgatgttgtatcatcagaatctgtagcctggctcatcacaggggctctcttatcagcaaaatagctactctagatgcgcagatgacgatccagccgcggttgcgctttatctcgtcgggacgaaatagccctgccttgtccctgccgccgccggtagaggctattttccatangccaaggtgaacatccgtgtctaatggtgcgaatttagtctggttccatgagcacttcgttccccgccatgcaatctttgttgattcggaaagatgggagctgtctgtttagctaattcaatctaccattgatcatgctaatttttgttatataggaaacaacatggacatgctgcccttttttccaatcaaaatacttctgt

SEQ ID NO: 10196 - DNA, 387 bp, Triticum aestivum
  Clone ID: LIB31-002-Q1-E1-B1
agagagatttgagtgttggggagactatcatttgaagcacaagagcaaggagttcatcatcaacacaccatttgctacttcttggagagtggtgtctcctagattggctaggtgtcacttgggagcctccgacaagattgtggggttgaaccaaggagtttgtaagggcaaggagatcgcctacttcgtgaagatctaccgctagtgaggcaattccttcgtgggcgatggccatgatgggataggcaaggttgcttattcatggacccttcgtgggtggagccctctgtggactcgcgcaaccgttaaccttcgtgggttgaagtctccatcaacgtggatgtacgatagcaccacctatcggaaccacgacaaaaacatccgtgt

SEQ ID NO: 10197 - DNA, 450 bp, Triticum aestivum
  Clone ID: LIB31-002-Q1-E1-B2
ccgggtcgaccgtgccggtgcacgaggtcatgcacgtattctacgtcgccctgctgtgcaccgaggagcacagcgtgcagcgcccgacgatgcgagaggtcgtgcagatcctgagcgagctcccaaagccagctgccaaccaagatggagaagaagagcttcctctctcctgcgaaggacctgaatccaaccctcctgccccaaccagttacaccgaggcaccagccggcgacgcgaaagatcagcagccgcagcagcggcacacaagctcggagtcgtcgcctcctcctgatctcatcagcatctgatcatccaagtacccggaagcatcgccgtccgtcgcaaatatgttggggcttcctttgatcgtgcaagcttaggcctgaatctggggttcgttgggtgagagactttgttggtgttgtgctgtacatatccaagctgctttgg

SEQ ID NO: 10198 - DNA, 455 bp, Triticum aestivum
  unsure at all n locations
  Clone ID: LIB31-002-Q1-E1-B4
ggtcttncaatcccgggtcgaccaagcacggagataagagaggacactcctctctattaattaattagctacctaacacaatatatgaaacacattaattaaccatacaaaacccccaaatcgccccccttcagaaaaaaaaagaaaaaccctagcccctgaacagctgacgcgtggatgcctattggtcccggttggtgtcaccaaccgggaccaaagggcctcctgcctgggctcgccgcaccggccacatggaggcccatctgtcctgattcgtgtaagaaccgggactaaaggccaagggcattagtaacaaccttttagtcccggttccaaaaccgagacagaagacccttacgaaccgggacaaatggccctttttctactagtgtgtccattttgtacacgaagtgcatccagtttttctcgtaaccctctcaaaattttagcacatg

SEQ ID NO: 10199 - DNA, 439 bp, Triticum aestivum
  unsure at all n locations
  Clone ID: LIB31-002-Q1-E1-B5
attgnccggtcgacagcagcaattaatgccgaagggcaggtctgtgagctggctgctagtgtgggctccgggaaggagagctccccgccggaattggagctgtctgcggggaaactcaatccgcaagcaccatggttggcaatgaggattcgcattggatcagcgagtccatttagaggcagcgtggtcaagttagccggactgtgggcgcccgcaataataaaagagattgggagaccatgcagacctgctcactgcaagaaccacggtgtacagggtcactcgagattttttttgtacaagccgggtgaaatgagactgggttcaggggcttgagtcggcgttcatgccaaatggttagacagttgggttcgaattccctccagttgtgcatcacaaagagtttttagttatgtcaacgtgcgtgtgttatttctgc

SEQ ID NO: 10200 - DNA, 406 bp, Triticum aestivum
  unsure at all n locations
  Clone ID: LIB31-002-Q1-E1-B7
ggcgagtcttctgcagagcatcatccatcccatccccaggtcataaacccaagtcggactcgccttcctcctccccaactactcctctcctctcctccgcgcatcgcaccggggtcacctgagatcacacacacaatggtgaaggctgtggctgtgcttactggcagtgagggtgtcaagggcaccatcttcttcacccaggagggagagggcccgaccaccgtgacgggaagtgtcaccggactcaaggaagggctccacggcttccatgtgcacgctcttggcgacaccaccaatggctgcatgtcaactggaccacacttcaaccccgctggtcatgtgcatggggcacctgaagatgaaatccgccatgctggtgatcttggnaatgtgacagctggagtgg

SEQ ID NO: 10201 - DNA, 444 bp, Triticum aestivum
  Clone ID: LIB31-002-Q1-E1-C1
cccgggtcgacttccaccaaagcgaaatccaccatctcatcgaaagacgggacacctttgcctctatcaagtggtatcagagcggtatcagttttcaggttgctcggtgagaatttccagttttcctagattagatttattttcttacctattgtccaagaaaaagccacaaaaaagagttagatctattcatccttggtccaagccagtctgagcctttgcaattttcttttcattgcttgcatagttgaattatcggttgcatcgtcgtgtcgagttgctggtcttagtgtctagttcgtttagagtttcgagttctgttcacattagtcacgccaccgctgcatcattatctcttctgctgtcaacacccatccatcaatttccaccacatgccacccatcattcattgtcataataatagttgagatcgttcacatcttc

SEQ ID NO: 10202 - DNA, 437 bp, Triticum aestivum
  Clone ID: LIB31-002-Q1-E1-C10
ggtccagaattccgggccgactacgtgaacagattcgacctcggagcccctgcgccaccgaatcgagctcgcgagcaccgcatcgacgccaacgccttcgtcttcaacctccggttccgcggttaaccgtcgccattcggcggcaacggcggcttcccggcctccgtcaagctcgtcttcggcatcaaaatgctggagtccaggagctagagatcccgaggatgattttacgtggagttcggcttcgaggagtagttaggaggtcccaggcaggaggccttgccttttcgatcgttgctacttttgtgctagccttcttaaggcaaacttgtttaacttatgtgtgtacacagatattgtcgcttccgctgactcgtctatgatcgagcacttgtattcgagccctcgaggcccctggcttgtattatgatgcttgt

SEQ ID NO: 10203 - DNA, 392 bp, Triticum aestivum
  Clone ID: LIB31-002-Q1-E1-C2
ctgattggcttccccgattttctggtggaaagaacacggtttgaagctgctgttgcgcagaactggactatcagagataagtgcagaatttggtgggcgaatgatgacggaggaggaagttggtgggagggacgtgtgttggcaataagacctaagtcacctgattttcctgagagtccatgggataaatatgccatacaatacaagaatgatggttcagatcatctgcatagcccctgggagctccatgatgctgatagcccattggttccatggaaacatccacatattgattccagtattaggaataaattgttatcagcagtgaccagtttacagaacaagtctcgcagaaaccaggattgctatggtgtcctgaagttggatgctgt

SEQ ID NO: 10204 - DNA, 247 bp, Triticum aestivum
  Clone ID: LIB31-002-Q1-E1-C3
cttctatgtgatggtagtttagatgatcgatatcgacttgtaatgtgaagacaaactcgctactcacggtctcgagacttgtaatataatgttctatctttgttcggtcttttcaattcggagactaatatgatgaattgtattcggagactaatatgatgaattgtattcttctattgtattcgatgaatctgttgttgatgtgtgctgtctattttttgtcaaactatacattttgtaacctgtg

SEQ ID NO: 10205 - DNA, 458 bp, Triticum aestivum
  Clone ID: LIB31-002-Q1-E1-C4
cggtcaaacaatcccgggtcgacgaaggttccttacagcacgtacagcatagctcaggtctcctatgagctcaacgtcttgggaacccgaggtcctaggcggatgcgctgtgtaatgcactccatccctgcctcatcgctcgaggctggtggcagtgtcccttgccaaccggatatcatcttctcccgttccctagacgaatctttcagcagcatgccggtctcgaaatcttccgtcatggaccattccatgcgttttagcagtgccagattctccgacgtctcaataggaggtggcccggcgatcagaggacaagccttgagcgacggcgatgatttgaaggacacgccgttgattctccgcaacaaggttccaagatggcatgagcagctgcagtgctggtgcctcaacttccgtggccgggtgactgtggcttctgtcaagaacttccagctcac

SEQ ID NO: 10206 - DNA, 442 bp, Triticum aestivum
  Clone ID: LIB31-002-Q1-E1-C8
attcgcgggccgacaagacgacagaaggggaatgatgagcatccaagttgggtataataaaaactatcatagaaagtgcattgaacactaggatcaatttgatgcttgataattgttttgagatataaaggcggtaatgttagagtcatgctagtgtgtaattatgaaattgagaaatacttgtgttggagttggcaagtcccgtagaatgcacgtatggtaaaagttgtgtgacaaatttgttgaatgaggtgctctttcgattgtcttccttatgagtggcagtcggggacgagcgatggtcttttcctaccaacctatccctctaggggcatgcgtagtagtactttgcttcgagggctaagtagacttttgcaataagtatatgagttctttatgactaatgtgagtccatggatataagcacactcacccttccact

SEQ ID NO: 10207 - DNA, 375 bp, Triticum aestivum
  Clone ID: LIB31-002-Q1-E1-C9
tggaagatatcgagatctctcggtcgttatgttgacaatgaaagtataccgctcaaaatgttattcatatctatttcaaaaccgagctctggcacctctacaaatccctgcttccctctgcgaaagtgccatctatttacatttatgtgtagagtcatcatcctcttattaaaacgcaccatttggagagcaccgctgtaatttgtacccattagtgttattttacacagtgtaacacatgagagtatctcttttaccatgaattacaatttctagtcagtccttgatctttaaaggtgctctgcatttatgttttgcggtctcagaaaggtctagtgagataccatcttgctatatcatatcatgattattttg

SEQ ID NO: 10208 - DNA, 417 bp, Triticum aestivum
  Clone ID: LIB31-002-Q1-E1-D1
cgggtcgacctccaccaaagagatatccatcatctcatcgaaagacgggacacctccgcctatatcaagtggtatcagatttctaggttgctcggtgagattttacagtttttcgtagtttagatcgagtctgttcttcatacctacagtccacgaaaaagccacaaaaaaattagggttagttcatcatatccgaaccaatctgagcctttgcataatctttttagggttttgctttgttgaatttgcggttgcatcgtcgtgtctagttgctggtcttagagtccagtcctttagagtttcgagttctggtcaaaagttgtcacgccggcgccgcaacatcatcatcgcccctggcatctaacaccaacgcttaaccgccaacgctccgaatccgtatccatataccaccaccga

SEQ ID NO: 10209 - DNA, 367 bp, Triticum aestivum
  Clone ID: LIB31-002-Q1-E1-D2
gggtcgacaaatgggggacataatataccgctggtgtgcggaaggagaaaaagaccagctcggaaagccaggcgcgagaggttcaagaactcaaggcacaggtggcgcggattccggagattgtccaggagtgagtggaacaacgactcggagcgacgatcaccgcccttgtgcctaccttgatctcggggttgagtgcgtggattgcgggcggccaacaggggccgcccccgattcctagcttcacagctagcaactcgcataatgcgatggcggggccattggtgcctccggcagaggcggcactggtgtctccgacgccggcacgggagcttaatgcacccgggtgtacgccggccggggactc

SEQ ID NO: 10210 - DNA, 446 bp, Triticum aestivum
  unsure at all n locations
  Clone ID: LIB31-002-Q1-E1-D3
tcccgggtcgacgattgtgtgcattgccatcagtgatgctcatgatagtgactgctccggcgtgcggcggctgcttcgcttcgtgaccggacgacctgtccagacgtatgaggctggtttggggcacccggctgtagatgtgctaagttaacaaaatccaccctttgtcaaaaatgcacgcatctgaagcgggcatccatggatcgttgctactaattagcatgattaggtcatagtgacaatactggaggttgttaaacattaaatcacatttgaatggttagatgtctacatcttgccgacaatcagggaaggtacgtcccttatgggggccgacggtctttttcctcttttggtgagcccgacaaagtanctgtattcgtaatttttttaacaacacaatgagaacttcagttattgttggttgataactttaagatgtgaaa

SEQ ID NO: 10211 - DNA, 453 bp, Triticum aestivum
  unsure at all n locations
  Clone ID: LIB31-002-Q1-E1-D4
cggtccagnntatccgggtcgaccccattaggaagtcagaagaagagatcgtcactatcaaagctcaaatggacaagtacttggccgtggtgaatgaaaaagaagctgaaaataccgagctgttggagaagatgaatcatctcgaggctcagctagttgaagccaacaaggccagtgaggaagccaaggccgagacccgtcaactgaaggacaaactattagacaaagagaacgaattacagaacatacaagaggagaatgaggacttgcaggcaaaggaatcagctgcttcggagaagataaaagagctctcttatctagtgccgaatggaacgacaaatggtggcaacaaggaagaagataacgagaatggtggcggtgtggatgacgaaccggtcgtggtggttgccaagatgtgggagaacagcaaggtcaccgactacgactcatcca

SEQ ID NO: 10212 - DNA, 431 bp, Triticum aestivum
  Clone ID: LIB31-002-Q1-E1-D5
attcgccggtcgacgacgggggatatgatgacctcagctccccgaagaccaaggagattatatgctcagaaataaggccaccacatgaaagaaaattttcggccgacgggggaggtgacgattcagaatcgtgttattctcacccaacaccggtggctccacccgccaagccttccgttgtgagcggaagctgcaagaaagaagccgccgccaaggccgtatcactagccgttgtcccaagcaagcagaaggggaaccccaacttgctcaagaggatcctgacaggaacgaagaaggatgccataatcaaaccaaaggtggtcctgagtgcttagctgacagagaccaagggtaactctatccatgataaattccatttccatgtgtaaattaaacctgtatcaattacctgttgagctgtggttcttgtc

SEQ ID NO: 10213 - DNA, 450 bp, Triticum aestivum
  unsure at all n locations
  Clone ID: LIB31-002-Q1-E1-D7
attcgccggtcgacgttcacaagaaaccactaagggaatcacaacatacatataatcaaaatatcaaacacatcaaattcacatgattacttctcccgtgacctcaagaacaaaagtaagtactcacaaatgatattcatgctgaagatgagatgggtattaaatagcataatggatctgaacatataatcttccaccaaataaaccatatagtaatcaactacaagatgtaatcaacactactagtcacccacaggtaccaatctgaggttctggtacaaagattgaacacaggcactanggtttgagaggagttggtgctattgaagatgttgatgaagattggcctcccaaagatgagagggttgttcgtgatgacgatggcttcaatttcccccttcgggagggaagttcccccggcggaatcgctccgccggagggcaaaagtgc

SEQ ID NO: 10214 - DNA, 387 bp, Triticum aestivum
  unsure at all n locations
  Clone ID: LIB31-002-Q1-E1-E12
atcttcctcaaaacggccaccatacctacctatcatggcatttccatagccattccgagatatattgccatgcaacttccatcatcatcatatacatgacttgagcatttattttcatattgctttgcatgatcgtaagatagctagcatgatgttttcatggcttgtccgttttttgatgtaattgctatgctagatcattgcacatcccggtacaccgccggaggcattcatatagagtcatatctttgttctagtatcaagttgtaatattgagttgtaagtaaataaaagtgtgatgatcatcattattagagcatttccccaagaaaaaaaaaggagaggccanagaagcctaaataaaaaaggggggccaaagaagcccgc

SEQ ID NO: 10215 - DNA, 441 bp, Triticum aestivum
  Clone ID: LIB31-002-Q1-E1-E2
cgggtcgaccgcttggtaaacccgagcaaagatatgaccgtgcctgagttgtgcatcgtggaggagatcaatgctgaattcaaggagtctgttcttgctcgggttggtctgaagggtacaatcattttgcggacgttaccaccaaagaaggcagcagggagggagacagagttctcattccggcttgagggtgcttctggaatgaagagggccgccttgcagagtaccgtgttgagcagcctcgagaacggcctgttccatgtgaagacaccatccaaggaggagcctatccccatcatgaaatacagcttcttgcccaagcactcacctctccccctgagggttccccttggtaagcgccacagtggcacactgctcccgctgatgaaacacaatgcgtcgaagccaaagttgccgcaaccactgagcaatgttacattc

SEQ ID NO: 10216 - DNA, 440 bp, Triticum aestivum
  Clone ID: LIB31-002-Q1-E1-F2
cgggtcgacatcgagccagatgcacatgtcaagcaggcgatgaatgagatcaatgcagctgcaaggatgagggtggctgcaaacgagaaggcggaggctgagaagattgtccagatcaagcgtgccgagggtgaagcagaggccaagtacctgtctggcctcggtatcgcccgccagcgccaggccattgtggatggcctgagggacagcgtcctgggcttctcagtcaatgtgcctggcaccactgcaaaggatgtgatggacatggtgctgatcacccagtactttgatactatgaaagaggtcggcgcgtcctccaagtcctcggcggtgttcatcccccatggccctggcgcggtgcgcgacatcgccacgcagatccgcgacgatcttcttcagggccagtctgcctctgacaactaagcagtttgcttcgccta

SEQ ID NO: 10217 - DNA, 456 bp, Triticum aestivum
  unsure at all n locations
  Clone ID: LIB31-002-Q1-E1-F3
acggtcttcntatccgggtcgaccgcggagaagaagaggcgatggcgtccgggtggggcatcaacgggaacaaggggcggtgctacgacttctggctggacttcagctcgtgcatgagccgctgccgccagccctccgactgcggcctcctccgcgaggactacctcgagtgcctccaccactccaaggagttccaacgcaggaacaggatctacaaggaggagcaacgtcagataagagctgctgctcgcaaggccaaggaggaagccgaaggagctcctgctgttgcagctcaccactagcatcccttttcaatttttttcttatgcttttgtttgttgcaagcgcttccatgttcggctatgagcaaggcaataattacctaaacattgcaccctcccacctccatgacttgttctaaaagcatgagtttgataaactaccttgggcatcaag

SEQ ID NO: 10218 - DNA, 435 bp, Triticum aestivum
  Clone ID: LIB31-002-Q1-E1-F5
acaaggtgattgaaccggattttcaaccaaagcagggggttaagatagttacagatgagaaggccactagtctgtcctctgcatctgttgacgacgctgctgtcattgaagagcttattgccaagttagaagaagtttccaaaacactgccatcagggttccacatgaacccaatacagtttgagaaggatgatgacacaaacttccatatggatgtgatagctggttttgccaacatgagggcaaggaactacagcattcctgaagtggacaagctcaaggccaggtttatagccagcaggatcatcccagctatcgccacctccaccgcgatggccactggcctcgtctgccttgagctttacaaagcccttgctggtggacacaatgttgaagactaccgcaacacgtttgcaaacctcgctatccctctct

SEQ ID NO: 10219 - DNA, 446 bp, Triticum aestivum
  Clone ID: LIB31-002-Q1-E1-G1
cccgggtcgacctgtctggtttaatttaacaactgccatattttgacatgctacaatagtgcattttcatgtgctgaaaccccagctttctaacgattcacttgtctgcagatatattgtatgactcgtggtcaccagcaatgacggtcagttccgtgtgcatcagcatcttgtccatgttgtcaagttcaccagctaaggtcacccagctccctctacattatctacaatctaactgaacggtcatctaactgtacatattgtttgcatgcaggaacgcccatccgataacgatcgctacgtcaggaactgccgcaacgggaggtctccgaaggagacgaggtggtggtttcatgatgacaaagtgtgatgggctccagctggtttcttcttccggcatcagcagctcttatacatcatcatcctgcctaccgtagtatggcgtg

SEQ ID NO: 10220 - DNA, 422 bp, Triticum aestivum
  Clone ID: LIB31-002-Q1-E1-G2
gggtcgaccggatttggaagatagaaaatggggaaaagaaagtctccactacttttttacgggaagcaacataatgcaaaatacattatcatgtgtccaatggcacccacacgtatcctcatagttttattttcttgagttggtctgaccgacatgtggaccaacgaatgggcatgtacgccacataagtaggagcacaatccgtgacggtccggatggtgtatattaaaaaaatgctaggcccgactaagcccgcttggtcaatctgcgacggattctgtgacggtagcccgacgtccgtcatcaagggcccgctgttttcgggcccaaccacggcttacaaatcagtgacggtagtcgtgacaggtcatggttttcccgtcatattcatgacagattctaggaatgtcagcacgaatccg

SEQ ID NO: 10221 - DNA, 442 bp, Triticum aestivum
  Clone ID: LIB31-002-Q1-E1-G3
cgggtcgacctatgtcgtgaacaaaggtaaggttcccggagtctacgatgactgggaggagtgtcggagacaggttcaccgattcagcggtaacagttacaaagggtacaccactagggctgaggccgaatctagatacgcccgctatctagcgggagaggggagggagcgttggaggaaccggatgaagacgattttcattgtgatgatgctcatcgtgatgaccgcagctctcttctatgtgatggtagtttagatgatcgatatcgacttgtaatgcaaagacaaactcgctactcgcggtctcgagacttgtaatataatgttctatctttgttcggtctttttaattcagagactaatatgatgaattgtattcggagactaatatgatgaattgtattcaaagactaatcttctattgtatttgatgaatctattg

SEQ ID NO: 10222 - DNA, 440 bp, Triticum aestivum
  Clone ID: LIB31-002-Q1-E1-G4
cgggtcgactcccccctccttccaacagagaggagaaaagggaaagagggggagagggagaaggaaagggggtctgcgccccccaccccttgtccaattcggactgccatgggggggcgccacctcttgtggcctgtctcctctccactatggcccatgaggcccattaactttcccggggggtttcggtaacctcccagtactccgaaaaatcccggaacctcttcggaactattccggtgtccgtacataaccttccaatatatcaatctttacctctcgaccatttcgagactcctcgtcatgtctgtgatttcatccgggactccaaacaaacttcggtcaccaaaacacataactcataatacaaatcgtcatcgaacgttaagcgttcggaccctacgggttcgagaactatgtagacatgaccgagacacatc

SEQ ID NO: 10223 - DNA, 304 bp, Triticum aestivum
  Clone ID: LIB31-002-Q1-E1-H1
gggtcgacaggtttgtataataatcaagaagcagctggcagtccctgatgggacccctgtcacagcggagtcaaaattttctgaacttggtgctgactcactggatacggttgagattgtgatgggcctcgaggaagagttcaacatcaccgttgatgaaacaagcgcgcaggacattgcaaccgtgcaggatgcagcggaccttatcgagaagcttgtgacagagaagaccgcgtaagttcctcggttcattggacacctttagaaggcaaatgtgtcgtctggatcggttggcttctgattt

SEQ ID NO: 10224 - DNA, 338 bp, Triticum aestivum
  Clone ID: LIB31-002-Q1-E1-H11
gaaaaaaaaaggaaacaagtaaaaaagcgtggtccccggggataggtacttcgtccggcgcggtatcattgctgagcgatcgctcgctatctggaaatggagtgttagtttcaaatagagattgtgtgggtgtgaagtgtactgaagatcgaggtttttcttcttactaactttgtcaaagaggctaaaaaaacaataaatgaccaacgaaacttcgagtgagtaggataaggaggagtagtcggaggatcttagaagggaattagagaaaaaagagcagcagctcagtaataacacctaggcttttgaattaactctgcgatttggaaaaaaaagag

SEQ ID NO: 10225 - DNA, 406 bp, Triticum aestivum
  Clone ID: LIB31-002-Q1-E1-H2
gggtcgaccgcaggcctgaaaagatctgtgcgtcagtacctgctctggagatggatcgatgaaagaaggcggcggcagcctcagtgagtgggccggactggcgtgtgacccagtcccggtatgtggctaggatggggcatccggcattagatattaggatttgatgcgatatctgtttggtattaggctccactgcattaaggggtaggagtagcgacagatgttgtctagatggtggcttcaagcttactgatatactactttgtaaggtttttgtgcttaatacataaagtggccgtatgcattgtccagatgcagaggccggggatgcatcctccttttctaaaaagaaaaaaccacggcacttgttatggattcaggtttggtcatgaagtgccccaaaaac

SEQ ID NO: 10226 - DNA, 448 bp, Triticum aestivum
  Clone ID: LIB31-002-Q1-E1-H3
ccgggtcgactccgaggaatacactgtggaggagcgcaacctcctctctgttgcatacaagaatgtgattggagcccgccgtgcctcatggcgcatcatctcctccattgaacagaaggaggagagccgtggcaacgaggaccgggtcacactcatcaaggaataccgtggcaagatcgaaactgagcttagcaagatctgtgatggcatcctcaagctgctcgaaacccaccttgtcccgtcttccactgcccctgagtccaaggtcttttatcttaagatgaagggtgactactacaggtatcttgccgaattcaagagtgggcctgagaggaaggatgctgctgagaataccatggtggcatacaaggctgctcaggatattgctttggctgagctggctccaactcatccgattaggcttgggctggcactaaacttctcggtg

SEQ ID NO: 10227 - DNA, 364 bp, Triticum aestivum
  Clone ID: LIB31-002-Q1-E1-H5
gacagaagaacgacgatgccgagccgccgggacatgatctgagtttgtccggatggactgcctcttgctagatatgtacgtacgtatggtaccattaattaaccaagcatgtggtgattgcattattttttggcccctgattggatctcatagtacttatgatacataaccaactcaacccccctccttgctctcgattgtattatatgtgcgagcatcgttctatgacagttcttgatatactcacttgttgaaccgcacaagtgcaggctgatggtgttctcctctgactaacacccccagctgacgctcatggcagtcttaatgataacccactagctaattgcaagtgttgctttgtttt

SEQ ID NO: 10228 - DNA, 330 bp, Triticum aestivum
  unsure at all n locations
  Clone ID: LIB31-002-Q1-E1-H9
ctacatgacacatcaccatatttgggcctaagggaatgcattgtggagtagttattagatgatgtgttgcgagagtggcagaagcttaaaccctagtttatgcgctattccgtaagggaccgattggatccaaaagtttaatgctatggttagaatttattcttaatacttttctcatagttgtagttgcttgcgagggggttaatcataagtaggaggttcgttcaattaagaacagcacctaagcaccggtccacccacatatcanattatcanagtagcgaacacgaatcgaatcaacatgatgaaagtgactagatgaaattcccg

SEQ ID NO: 10229 - DNA, 281 bp, Triticum aestivum
  Clone ID: LIB31-003-Q1-E1-A1
gaggtggctttgattgtgaaggaagtgaccgatgggcagagcacctgggcagacatcatgtggagatacccagcacataccgccttggccaccgatgaggaacaagcttcagaaacctgaagggtagagtcgaagagtcttccatgggttgaagcgatgtttggcttcctgagtttccgatgtgtgtcctgttaacagaaatactaatagagcgcttgccctgtagaccgacgcctgttttcccctcacgtatggttttcagccgttcgctgtcaatattt

SEQ ID NO: 10230 - DNA, 366 bp, Triticum aestivum
  Clone ID: LIB31-003-Q1-E1-A10
gggtccacgtcggtatccctacaaagactgggggtgtcccttgtttagtgccagctatccgcaatgaacgtctaaccaaggacttcaaaggccctaggaaggtgcctaattacacggcagacttacaacccgcagcctggatcgagagttatgagatggctatggaactgtgtgacgcccggataattaggctacagtaatcccacgttaacgatgccacgtcaccccgtttactgttgataaactctcgatagttcagaaccgaaacaaattcaaaatttaaataaaagcaaataatagaagtttacaaatattaaaactaaaatgttcggagtgagccaaatagtccatattaaatattggtga

SEQ ID NO: 10231 - DNA, 450 bp, Triticum aestivum
  Clone ID: LIB31-003-Q1-E1-A12
gggtccacctcctccggcctacacctgcgactgttcatccatgggctcctgttcatccagcctccaccggctactgttcaaccagccctccaccggctactgttcaaccaaccctccacggggtcctgttcatccaaccccacaccaagaattgttcatccaaaccccgtcaacaatgctcactgttcatccagggaaggaggcaacggtgtttgatcggcttcagttagcagcagtagcgaaggaatcacactcgggtttagttaacagcaagggatcgatcgatcgctcgggttcagtaatgcgtatcctgcagtgaaatcgctcgggttcagttagagcccaacgcctcacacacacccccgtacgtacgagagaaacgcacatcgctcggcccctgaccagccaccgtaaccgggaactccccggtattttcctcgccctcgcttc

SEQ ID NO: 10232 - DNA, 436 bp, Triticum aestivum
  Clone ID: LIB31-003-Q1-E1-A3
ggggccacgtcctctgcttcatcttcctccagggctcgtagatgtttttctggaccaatgaggtctcccattagatacagagaggggccgctggactacgagccattcacaccatgtgattgccgtgagaagccaaaagcagccatgtggatctcatggagcgacgagaatccaggtagaagatacaagacatgttaccgctcgaggaggggaggttgtgagttctacgagtggcacgacaatccgatcgcagatcctttcctcaaacagctggttatcgatcttagggaccaagtgtggttatttgagaggaggaacgctgctctgcaagatgctacgaggacagcagaaactgaagcggcaaatctatctcgacaactttcagaagctatggagtcgggcatggacagccgtgcaaaaattatggtggctcctg

SEQ ID NO: 10233 - DNA, 386 bp, Triticum aestivum
  Clone ID: LIB31-003-Q1-E1-A4
ggggccactctcttgacctgatcaacgtggatttcactgggacatgatgcccgccgcctgcacacaagtttgctatttctgcatggactaccaatgctgtcaacgttgtgcttgcctcagacaacgctactgacaccacactacgaaaactgcacgttaattctggtttctttgcccacaccgcatgcctacaaattgcgatcaagcaaccgtctgtgggtcataagagatgactacctttgttatccacggcttgtctactactgtatccatgtctcaatccacatggcaactcttttcaattctgcttaaacttacattctctctcttacgtcctaacgttatttcatttttttcctttctgttcttttccaactgatttgcca

SEQ ID NO: 10234 - DNA, 339 bp, Triticum aestivum
  Clone ID: LIB31-003-Q1-E1-A5
gtcgacatcgatcatgatacgcaggtcaagcaggctatgactgagatcaatgcagctgcaaagatgatggtggctgcaagcgagaatgcagaggctgataagattgtccagatcaagcgtgccgacggttaagcagaggccaagtacctgtctggcctcagtatcgctcgctagcgctacgccattgtggatggcttgacggacagcgtcctgagcttctcagtcaatgtgcctggtagcactgcacacgacgtgatggacatggtgctgatcacgcactaccttgctactaataaagacattggcgcgtcctccaagtcctctgtcgtgcttatcccc

SEQ ID NO: 10235 - DNA, 354 bp, Triticum aestivum
  Clone ID: LIB31-003-Q1-E1-B1
tttatactatgcaacagtcatttttttagtataaaaaataacggagggagtataaaacaaggggtacgactatccttgtggcaatgctatgtctggctggctatatgcatgcatgcaatgtttcggcatgtcatgtatgggccatggatgggtcacacttacatcatcgttgaactttctagtttgatggatattagtacgcagatgagaaatgaaagaacacatacatttgtccaagtcgttaatgattgtgtggacctagcataatagactacaaatgtatttgtaccattggtattgcccattataggagggaaacttctcaaacaactttacacaagttgcaccttttgt

SEQ ID NO: 10236 - DNA, 410 bp, Triticum aestivum
  Clone ID: LIB31-003-Q1-E1-B12
gggtcgacgccgacggcgacagcaacgtcaacttcgaggaattcaagaagatgatgggcggcggagggaggagctaggtcggtaagggccggccatgagcaaacaatgctgcatctgcatgcctcgttgagggttttgttcctccatggtgcttaatttaattttaattaatctcaaagtgaaaggcttaggctccccgtaatgcgaatactaatgatgatgcgggtgaagtgattaattatgtaaatctaatcttctagtagtagtagtactactaatgatgatgggtgtactaagaaatttggtctggggttgtttgcaatgaattagaactcgtttgaaaccctttgtttttctgtttggcactctttgtttttctgtttgaaactcatgcaaaatcaataactata

SEQ ID NO: 10237 - DNA, 402 bp, Triticum aestivum
  Clone ID: LIB31-003-Q1-E1-B4
aggtgagattgtgacacagctgaacctgtcagatgatgatgttgtccgtttgctccattctctctcttgcgcgaaatacacgattcttagcaaagaaccagctggtggaactatttcgcccaatgattcttttgagttcaattcacaatttactgactggatgagaaggatcaagatacccctagctcctgttgatgagaagaaaaaggttgttgaggacgttgacaaggaccggaagtatgcaattgatgcatcaattgtgcgtatcatgaagagtcgcaaagttatggcccatacacagctagttgcggaatgtgtggagcagctcagccgcatgttcaagcctgacttcagaacagtcaagaatatgattgaagatctcatcacgatggattacctgga

SEQ ID NO: 10238 - DNA, 431 bp, Triticum aestivum
  Clone ID: LIB31-003-Q1-E1-B5
tcgacctatcagaggctatgtgattttaagctagcgccgatatttattaacacacagaggcggcacaattgagacagtgttcacaaaatttagaacgtttcactgaaaattgtgaacatcttttaaataccgaatactttttagattccgtgaacaattttctagaacagaaacatttttcgaaattccaaaacagtatttggaaacaaaatcattttgtgaaatccatgaactttttgtaatacgcgaacattttttaaatccatgacttttttaatatgcaaacattatttgaatctgtgaacaatatttaaaacgagaacaattttttgaaaacttgaataacctataaaaaaactgtaacgcattttaaaatgagaaaatagtttgaaataccgaaaaaaaatcacacaagcaaattttgaaactat

SEQ ID NO: 10239 - DNA, 440 bp, Triticum aestivum
  Clone ID: LIB31-003-Q1-E1-B7
attcgccggtcgactacagtcaagatgatgtcttttttcctggacaaaagaatcatggtgcgtagatatattcgcctttaccttgatgtatgtttgcagttcgctctgtgtcatgctacccagtacccactgctcgtctagtatgtaagccgtcattctttgttccagtcctgcactgatagtctgataccactatcttgggctctaaacattacaggatgctccgacgatcatcagaattcccttgagagccatacttgacatcgtgctagcagagctgggaatcccagaggccgaataccgtcgcgagatatgcgacgataacaagatctgcgtcaccgtgcttttcgacgcctctacaatcaaaggagcccccgcccatatgtcgatatccggaacatattccacggacgatgaagtggcagaggacacagctgctc

SEQ ID NO: 10240 - DNA, 344 bp, Triticum aestivum
  Clone ID: LIB31-003-Q1-E1-C10
cttctacatgagtgccaagattttgggcaacgctggggaccggcaagtcgcgagttcatacctcgaaggcgtcattctagtgaaccccagataaggataacttcctcgtgccttgctttcccgagtaagtcatcccctcaccggcctgtaacatatgatttcttagacttcgatcgttcctttgtttctaacattctgtgttttgtgcagtgacacacattgcacactcatcctcttaagcccgaactattccatggccacgtatttcgactcagaccgtcaatctaagaaagactacacaaatatcaagaaatttcttgatgatgttctcccccggtatgcca

SEQ ID NO: 10241 - DNA, 206 bp, Triticum aestivum
  Clone ID: LIB31-003-Q1-E1-C11
gggtcgaccttctagatagattggatatcgtacggacacagatatatggccctatcgagatgatccagatattagcaattagagcacaagtggaggacattgaaattgatgaggacagtcttgcatttctaggacaggttgggcagcagacatctttgagacatgctattcatctgatgtcacctgctattgtagttgcgaaggct

SEQ ID NO: 10242 - DNA, 330 bp, Triticum aestivum
  Clone ID: LIB31-003-Q1-E1-C12
gggtccagcccgtacatcgaaaaggcatatgatacagtctataaataaattagtacctacatgattttgaatataagggtaaccttaaaaccaatgacaatcaataatgtgggataaagatgttaaagcaagaatggggcgcaaccagacgtgacacgagcattttgttttcccatggcctgagacaatggggcatttatgtctacgaacaactccatgctcaggacagacacaacatggggccaccattagtgttaataatcccaaaagtgaatgagtcatggatgacgtttttacttgaacaaaccataagtcgccaaccacaaagaa

SEQ ID NO: 10243 - DNA, 242 bp, Triticum aestivum
  Clone ID: LIB31-003-Q1-E1-C8
ttcgccggtccacaagcccgacgccaactaggatatggatgaacaattgagctttcttggatgttgacaaagctctttcagaatctcagaaatactgctgtgtactttccttgtatcaatgggaaacaggggcttctgtttttgtttttggtttcccaacgtcagattaataatatatagataacctaaatcatacaaaatgtggttcccatgcaaattatttatcctttcctaccttgatt

SEQ ID NO: 10244 - DNA, 448 bp, Triticum aestivum
  Clone ID: LIB31-003-Q1-E1-C9
gggtccactcttcacttggacctcaggctcaggggcggtactatgatcaaggttaagactctcactgggaaggagatcgaaatcgacattgagcccaccgacacgattgataggatcaaggagcgtgttgaggagaaagaaggcattcctcctgtgcagcaaaggctgatttatgctggtaagcagcttgcagatgacaagactgccaaggactacaacatcgaaggtggctcggtcctccatcttgtccttgctctgaggggtggttactagttaagctgtaatggaaacgcttgcgtcctgagagaagtgaccattggtggcatggaacctgtgttgcaaagagataataacaaactagctttgcttagtgggaggggctgtcttccaatgtagccgcctatatgatttgacagaactactcgcaagttaaaaaaagggtttgctt

SEQ ID NO: 10245 - DNA, 440 bp, Triticum aestivum
  Clone ID: LIB31-003-Q1-E1-D10
gggtccacttggccatggttcttccgagcaccgtcataagtggaagacgaacaattgggcggcacggtccccttgttcaagtcctgtggtggaaggaagtaatttgcaacagctacgttgttgtcaaggacagggatatcacctgtaagagtcctgaatgcaaactccaggcatgggtctgaccagatacttcgaaacagcgacgacagggaatatccgggcatagcatcagctgttccaacaagtccgttcggttgcggcggagcatccacattctggcatccaacgtctgttaacgagcatgcagcagatgctcctagtatctgttcaggagctgaaggatacttgtcttcagcatttccagaagtacttggggcatgtgcaacatctttattctgaatttacggagaggaaattgcctttgacttaggaatttttga

SEQ ID NO: 10246 - DNA, 422 bp, Triticum aestivum
  Clone ID: LIB31-003-Q1-E1-D12
ggtcgagactggcgccgggggcaacaacgccgccaagctgcacgagctcgacgagatgaagcgccgtctcaaggagatggaggaggaggccgctgccctccgcgaggtgcaggccaaggtcgccaaggagatgcaaggcggagatcctaacgcgaccacatctgaagcaaaagaagagatggattctcgttctgtttttgttggaaatgttgactatgcatgcactccagaagaagtgcagcagcattttaattcctgcggaaccgtcaaccgagtgactatcctgactgacaagtttgggcagcctaaaggttttgcttatgttgaatttgttgaagcagaagctatccaggaagctgtcaagctgagtgagtcagagcttcatggtcggcaaatcaaggtaccaccgaaccgaactaacg

SEQ ID NO: 10247 - DNA, 446 bp, Triticum aestivum
  Clone ID: LIB31-003-Q1-E1-D3
ggtccgagattaccgggtccacccctgggggctacacaacattgctcaaatccacatgattatatttacaaagtacctgctcattattgcataatgacccgacccttgggggctacactagttgaagttttgagtataagacaattacaagtcccaggttgctgcaagcatgacaacccggcacttgggagctacataatatggagtattcaggttttactaagtgactgggatgaacaacatgggtttcttcttaagtggcagtatttatgttgaagcaagtcttaagccatcactttgttctactcaagacttgggggctacaggtattataatattatcgaagaaatattttttcagactctgttttgagcaaaccagattgaaccggtgtctgcaacaatcatgccccggaattatcagtttttataacccgaaaatggtgg

SEQ ID NO: 10248 - DNA, 440 bp, Triticum aestivum
  Clone ID: LIB31-003-Q1-E1-D4
ggtccgagatagcgggtcgagacgagagttagcgatctacagctggttcggtggactggtggtgacacgggcgggccctctactttatttgccgaatccaatcgatcatgggcggccctcttcgttcacagtctttctttcctttcgaatccaattgttccaatctgaccaaatagcaattcattgaaatcattcgggtcacctcttttttaagcacttgaccaagcctatttctatagaaaaggacaggaatctattgactttgagtctgtctcctactacgaaattggaactgaatacaggatggcaatagtgagaaaaaaaatcccctcgtactacgtcattatttattcgattttccctggtaagtgctccagatgcagttgctttagttgacgtactgagtgggaactaattatatgtgtccttgaataccagag

SEQ ID NO: 10249 - DNA, 392 bp, Triticum aestivum
  Clone ID: LIB31-003-Q1-E1-D6
agttgaccactgcaggatgcacggatgcggagaaggtgtgttttgccgcacatcagctagatggacccgcagcatcatggtgggagaatttcacaaccacttatcctatcgacactgtcacatgggaccagtttcagcaggctttccgtactgcccatgttccagcaggagctatggccatgaagaatcgtgagtttcacaacttacaccaatgaggacgtacagttggccagtatgtggatgtctttagtaagctagcacgttatgccccagatgacgttgctacagatgcagctaagcaggagaagtttctggaaggactgaatgatgagctgagcatgcagttgatggtagcaaccttcaacaactaccaggagttggtaaggatctct

SEQ ID NO: 10250 - DNA, 420 bp, Triticum aestivum
  Clone ID: LIB31-003-Q1-E1-D9
ggccggtccgatattacgggtccagaccactggccaacttgtctatgagcttggaggcattgacaggcgtgtgatcgagaggttcgaagatgaatcagctgagatgaagaaatgtggcaagtacgcatgggtgcttgacaagctgaagtctgagcgtgagaggggtatcgccattgatattgccctgcggaaagttcgagaccaccaagtacaacttcagtgtccttgacatcactggttacctcctatggcgactgtgcggtgctcatcattgattcctccactggtggttttgaggctggtatttccaagggtggcctgactctggagcatgtcctccttgccttaactaccggagtggagcacatgatctgctgctgcaacaaagtaaatgttttgacacatcatgcttgtttttac

SEQ ID NO: 10251 - DNA, 279 bp, Triticum aestivum
  Clone ID: LIB31-003-Q1-E1-E10
cgggtcgaggcgagggatagatgatgatgacaggcgaatgaacagtcaggtggttgcactttatccatcctgccaccatattacgttacgtatacatactctatattgactgctgagttcagaatcgcagttgtcaaagttgacagtacagtatgagattttgactaagctgaagtcctgcgggggcaagtggcaatcttgcatgtcctcaggatgtctccactattgcatatgggtccaggccccagtcaatggctacatccacatatgcatgcatga

SEQ ID NO: 10252 - DNA, 401 bp, Triticum aestivum
  Clone ID: LIB31-003-Q1-E1-E11
cgggtccaccaggacaccctcatcgacctcatgctcgctgccaattacctcgacatgcagagcctgctcgacctgacgtgcaagacggtggcggaccagatcaggggcaggaccctcgaggagatccgcaagaagttcaacatccgcaacgactacaccaaggatgaggagcaggaggtccgcagggagaactcgtgggcattcaattagaagccgtctagctatttgcttgtccatttgatcatcactgcgtaggctatccatcggtcgatccacggctatgatgggcctggttacctgatcatatgcgctttctcactcttataaagcaatcaacggggccgaaatgcctacctggatgtacaaaaggggccgccagacggcgaaaagaaaagcggccc

SEQ ID NO: 10253 - DNA, 444 bp, Triticum aestivum
  Clone ID: LIB31-003-Q1-E1-E12
cgggtccagcctgctacccaatgcatgtcgttaaaaagcattaattgtaaatttttttacgcctagacttagatgaataaggatctctatttaatagagatatttatatttgtccatacctttttgtaatgagtttataatcttaaaataaaatatgctactgagttggttaccttgaatgtggtgcgcaccgtgagtaatggaatacatagttccagttccaaaaatgggaatccacatacttatcccatatttttttgatagaattcttttaactatactcttttaacaagtagacgagatatattaacgatctatttaaatgagcgatgtatacttctgaaaatatattcatattttgcacgtaattttcacataatatctacaatctaagataattataacataattattgtcaacaaaaagttaagtacaaagtatttc

SEQ ID NO: 10254 - DNA, 385 bp, Triticum aestivum
  Clone ID: LIB31-003-Q1-E1-E2
cggtccgaaataccgggtcgagttccaccaaagcgataaacatcatctcatcgaaagacgggacacctttgcctctatcaagtggtatcagatttccaggttgctcggtgagattttacagtttttcgtagtttagatcgagtctgttcttcatacctacagtccacgaaaaagccacaaaaaaaattagggttagttcatcatatccgaaccaatctgagcctttgcataatctttttagggtttttgctttgttgaatttgcggttgcatcgtcgtgtcaagttgctggtcttagagtctagtcttttagagtttcgagttctgggcctaagttgtcacgccgccgccgcaccatcatcatcggcttgccatctaccaacatt

SEQ ID NO: 10255 - DNA, 426 bp, Triticum aestivum
  unsure at all n locations
  Clone ID: LIB31-003-Q1-E1-E4
ggtccgaaataacgggtcgacctgaaggcagacaaaaaaaagatcaaggctgccgtgaaaaagatgtacgacatccaggccaagaaggttaacaccctgatcaggcctgatggcaagaagaaggcgtacgtgaagctgacaccagactatgatgctcttgacgtggccaacaagatcggcatcatataagtcagagggacggtcctgcagtaggcgcttgtgtcgtggtttcttatgttattggagttttgtagttgttacttagcanaggggctcagtggctccattgcctaccatatcgccgcgcactttcatgaatttgatgcaatcgaagtgacttgtgttgatgctaatttgaagctttgcgtttggtcttaccgtattggttggtatctttaccatccttcgacttaccttatttcctgt

SEQ ID NO: 10256 - DNA, 451 bp, Triticum aestivum
  Clone ID: LIB31-003-Q1-E1-F10
gggtccacgttgcattggtatgtgtcagtaggtttttcaagaaaatatgttcttatgtcacctccataagtgatatggagaagctagaggagaaaacgctgagacgttgtgcactcttgaggccatatttctgtcatcattttttgatcttatggttcatcttttcaacccaagtgaggctaggagggccaataaagtacaacaacatgtacccgatagaaagatcatccatgaacctattttcttggtgtcctatggtttcttccttatctcaaaaataattcaatatatgttatgtatatattatataggaatagtatgaggctaaaggggtttgttcgtaccaaaagccatcctgaggggtcaattgcagagggctatcactttgacgagtccattacattctgctcgcattatttacaaggatgtgagactagatttaacaaaaatg

SEQ ID NO: 10257 - DNA, 421 bp, Triticum aestivum
  Clone ID: LIB31-003-Q1-E1-F12
gggtccacgatgtatatgtagtatgacgaggtggccttccattgccctagaggcgctgggtcttggtcgtctcctgcattggcgtccataccgtcgatgtcttcagagtcgaagtcgagcatgccagttaaatcatcgacagtggctacgaagtgagtggtgggtgggctttgaatttctttgtcgtccgcatcccaaccttgctgaccatagtccggccagggctctcctaataaggagagagactttagtgaattcagaatgtcgccgaagggcgagtgttgaaagatgtctgcggcggcgaactccatgatcggcgcccaattgggttcaatcggcaggggcgtggaaggttcggagtccggaaaggagtccggcaccttggagtcgcgagcttcgcaaaagacaagactggtgttcg

SEQ ID NO: 10258 - DNA, 179 bp, Triticum aestivum
  Clone ID: LIB31-003-Q1-E1-F2
ggtcgagtccatccgtcagatgcaaagcacccagtagatgagaggcaggaagatacatgggagagtggtttgccccagacgagtgtgcaatgcctcttcatcggacaataactttttgctaaggaagcaggtcagctcaaagccatttattggatgtgtccagatggtgggctcacatt

SEQ ID NO: 10259 - DNA, 417 bp, Triticum aestivum
  Clone ID: LIB31-003-Q1-E1-F3
cggtccgagataacgggtcgacatcgagccagatgcgcatgtcaagcaggcgatgaatgagatcaatgcagctgcaaggatgagggtggctgcaaacgagaaggcggaggctgagaagattgtccagatcaagcgtgccgagggtgaagcagaggccaagtacctgtctggcctcggtatcgcccgccagcgccaggccattgtggatggcctgagggacagcgtcctgggcttctcagtcaatgtgcctggcaccactgcaaaggatgtgatggacatggtgctgatcacccagtacttcgatactatgaaagagattggcgcgtcctccaagtcctcggcggtgttcatcccccatggccctggtgcggtgcgcgacatcgccacgcagattcgtgacggtcttcttcaaagcca

SEQ ID NO: 10260 - DNA, 318 bp, Triticum aestivum
  Clone ID: LIB31-003-Q1-E1-F9
gggtccacactgaggaaggagggctggctgtcaaccccaacttctttgttgatttcgggaccgagcctgaaggtccctccttggcccatgagatgagatatcctggtggagactgcacctctgacatatggatctaggaggaagggtgtaggacacaggcagctggagatccatggtgttgagctcactgtaattaaaatggtctcttccccgcctgcggtgttgtatgtgatgtggtatcaattggaataagttcctgatagaacctctgacattggcttcatgggagctttgggcccgaataagagttgcctctga

SEQ ID NO: 10261 - DNA, 188 bp, Triticum aestivum
  Clone ID: LIB31-003-Q1-E1-G12
gtcactgattcatcaaatgtggatgcctcctgtgacgagattcgcctggatcgatctggagccccatgcacgccactggtggcagatccatcatagatcgccgtacgcgcacgctaaggacaccaccaggcacgggtctatcgttgaggatgatggtccctgtctagtgaatgattatttcctccagg

SEQ ID NO: 10262 - DNA, 449 bp, Triticum aestivum
  Clone ID: LIB31-003-Q1-E1-G3
ggtccgaaattaacgggtccactacctgatccgcaccaaatgggtgccttgcctcgagttcagcaaggttgggttcatcttccgtgagcacaacgcatcccctgggtactacgatggccggtactggacaatgtggaagctgcctatgttcgggtgcaccgacgccacacaggtgatcaacgaggtggaagaggtcaagaaggagtaccctgacgcgtacgtccgcatcatcgggttcgacaacatgcgccaggtgcagtgcgtcagctgcatcgccttcaagccaccgggctgcgaggagtccggcaaggcctaaacagctcactcaccacgggccacatataaagtgccattgcggttttgtcaactctgacattgctttgggttttccttctccatttatctttcttgtttgttcctaagaatatgtgtatgtccatgttcatgta

SEQ ID NO: 10263 - DNA, 398 bp, Triticum aestivum
  Clone ID: LIB31-003-Q1-E1-H10
gggtccacaacgccgaggaagagaggaaggcgatcatgtgggaagagacgaacgggctggtgagcgagtacgcgaagatccatcttggacagcactcgtcctgggaacccgcggttcctccccttggatccatggtcaagggaagcctcagtccgttatgacgatctggcgaagtaatttcgctgatattcaagctggacgacaatcccccttggaaccccccgtttctcctcttgaagtcaagggccaacaagaacctctagccctttgttaaagctggtgaccgcaccatcggaggattgctatccttggatggtaattgttagtgaattgtaggaattcttttctttgccggagccataaggaggtggtgttcgttcaatgggggctaaaatttt

SEQ ID NO: 10264 - DNA, 243 bp, Triticum aestivum
  Clone ID: LIB31-003-Q1-E1-H11
atgaatagcatactctagcctgcggaggaagtgacagataaagtacactctctcgatggattttggtgtggggataacatgccctttattacggagcctgtgggggacttcagcagtcaggtacctcgccttccagagcttcgtgataacctcctcagtgaccgaggaggctgcccacctaccttgggagatggatcccgacataactagagggtccggtaacaatggaagaaatctaatcct

SEQ ID NO: 10265 - DNA, 429 bp, Triticum aestivum
  Clone ID: LIB31-003-Q1-E1-H4
gggtcgacttctcgtggttgccgatgcgcagaactgcatgggaggtttgaggagatcacgttccaagctgccgatgaagagcaatctggtttgcatgactcagggggcagctctgatgatggatgcgcgcaaaaggagcaacatgtcaaagacaatgaacccatatgcctgaatgggtttccaaagatgggtagaagaggtctttctgatcggctttgcttcagttctttccaggagcggtcgtgcccaaccgagaattatgagagcgatgccgatcatcagcctaaggggttcgacataaagcatgaagtgaagatggccaagtacaaatcacgggaaatgggacacctgaagagagctattcatccatctctggacttcgacaacaccacgaatggagcaagcatgacgaagcctacactgagcaag

SEQ ID NO: 10266 - DNA, 244 bp, Triticum aestivum
  Clone ID: LIB31-004-Q1-E1-A2
gcagcaaggctgctggacttgctggaaactgtggtatacgttatggtgccagtttgcgtatgcagatcatgaggatggaagtgtctcagcactccaagtacttcagtgagttctgcgggaagtttgctgtggtcaggaaagcagttggaatttggggatgcaaggactgtgggaaggtgaaggctgtcggtgcttacaccatgaacactgccagtacagtcacctgtcaggagcaccatccgtc

SEQ ID NO: 10267 - DNA, 432 bp, Triticum aestivum
  Clone ID: LIB31-004-Q1-E1-A6
ttcgccggtccactacatcacactacaccattgtttgggcctagaggaaggcattgggaagtaataagtagatgatgggttgctagagtgatagaagcttaaaccctagtttatgcgttgcttcgtaaggggctgatttggatccatatgtttcacgctatggttaggtttaccttaatacttcttttgtacttgcggatgcttgcaataggagttaatcataagtgggatgcttgtccaagtaagtacatgtagcgaccagacctcaaatggtctgtgctgctgtgcaccagtgtcatccctggatcagtaatgctgacacgcacactacaaatggaggatttataacagattagcaatcacacactttttacatcgaataactccgaagagtttaagtatgataaatatggcttaaggccatctaataac

SEQ ID NO: 10268 - DNA, 443 bp, Triticum aestivum
  Clone ID: LIB31-004-Q1-E1-A7
ggtcgacagccataagagggagctagtcaaattgttttgcatatgtcacagtagaatggaggatatcattccaaaagattctcctgtgaggcttgtagcattcaatctgggctaccttccaggaggagataaacaaataatcacagtacctgagacaactgagctggcactacaagctgccagcagaattgttggctcagggggactcataagtgtccttgtctacattgggcatctgggtggaagggatgaactcgatattgttgaatcatttgcgtcaagcttgcctgctgatacatgggtgagctgcaagtttgaaatgattaacaggccaattgctccagtactagttctcctacacaaaagatgatcacaatcccactgaagctccacaagtttgggactcgctattctggatttccggttgatgaatgaaattgcgc

SEQ ID NO: 10269 - DNA, 340 bp, Triticum aestivum
  Clone ID: LIB31-004-Q1-E1-B3
aggtccaatctagacaccatctcggatggggttcaccacctccattggtgcctctccgatgatgtgtgagtagttctttgtagatcttcgggtccgtagttagtagctagatggctttctctctctcactgaattctcaatacgatggtctcttggagatccatatgatctaactcttttgtggtgtctttgttgggatctgatgaactttgagtttatgatcagtcatatctttttatatccatgaaagttatttgagtttctttgatctcttatatgcatgatctcttatagcctcgtatttcttctccgatatattggttttgtgtggccaacttga

SEQ ID NO: 10270 - DNA, 416 bp, Triticum aestivum
  Clone ID: LIB31-004-Q1-E1-B4
gtagatgcactctcctttctactcgtagttggtttctccatagatagatcttggtgacacgtaggaaaattttgaatttctgctacgttccccaacagtcgtctcccgaccagttaggtcggaaagaggacccccatgacggttcgcgaatgggccacttcaggcagcccatgacgtatacaaggaagattccacaagacttagcgcgcaagacgacgactcttctaaaccctaggcctctgatgcattatataaaccgagactacgctagtcaatacgacatcttatattcattacaacaatatcgtggtagatatcggtactatactatccccaatatatgaatataatctcgaacttgggtaaaatcatgtgtccatgttgctatcgctacaagacgcctaacttatgaccct

SEQ ID NO: 10271 - DNA, 453 bp, Triticum aestivum
  Clone ID: LIB31-004-Q1-E1-B6
ttcgcgggtcgacacctttaatcgaatttttcagtacaacattgctgtggctgctaccacggacaagatacttggtgcgaggaatcccgagatccccatccgcgagctgagggtcaggttctgtttgaggcatgatgagtgtctctccatcagccaagctgttgcccgcaccatggcaacccacaagctcgatgtcgctgagtttgtcgtcctcacggagaagactagttggagatgcactcaacatgatctcctctcctttgccaagcggttcaatacttggtttggtgattgtccagttgtgtttgctggtctcacgcacctgtggctgcggaatttgaggtttggtgaactggacatccacaacatcctcaacacctgcaagcgcttggaatctctgcgtctcacccattgtgaaccaggggtccgctccgtgcttcaagtacagcatgc

SEQ ID NO: 10272 - DNA, 368 bp, Triticum aestivum
  Clone ID: LIB31-004-Q1-E1-B7
ggtccacgtggaggtggcagatcagaggagccggcgaaaaggtcggccagggaacgggaatagcagctccaccgtctcgtcctcccaaattctcagagcggagctggagtaatgccgtctgcgtcggcgtcggcgtcgagccgtcaagggtgcgggatgtgggatgtctgcccatccgcaactactggaagaacacgctggcagcgagcgtctccaagagcaagggaggagatgacgttgcagctcaagggggccgcactacctgaaggtgagcatggatggcgcccatttttccccatcaaatttgtacaaattcgttgcagagcaagggacttttgtgttttaatcagtgggtgaattttttgcaa

SEQ ID NO: 10273 - DNA, 336 bp, Triticum aestivum
  Clone ID: LIB31-004-Q1-E1-C1
ggggcatcacgtctgcgacaagtataccgaagatgattctgcatctactactattactccacacattgaccgctatccatcatgcatctacagtattaagttcataagaatagagtaacgcattaggcaagatgacatgatgtacagggataaactcaatcaatatgatataaaccccatctttttatcctcgatggaaacaatacaatacgtgccttactaccgctgttgtcacaagtaaaggacaccgcaagattgaacccaaagctaagcacttctcccatttacaagaaagatcaatctagtaagccaaaccaaactgataattcgaagaga

SEQ ID NO: 10274 - DNA, 183 bp, Triticum aestivum
  Clone ID: LIB31-004-Q1-E1-C10
gcggttcccaaacagaatggtaaagtttatactcccccttccaccaataagcatcaatccatggcttgctcaaaacacagagtgcctccaactaacaagagtcccaaggggatttttgtttgcaatattttgatttgatttgcataaagcatgggactgggcatcccggtgaacaaccacttt

SEQ ID NO: 10275 - DNA, 312 bp, Triticum aestivum
  Clone ID: LIB31-004-Q1-E1-C3
caaggcggccgtgaaaaagatgtacgacatccaagccaagaaggttaacaccctgatcaggcctgatggcaagaagaaggcgtacgtgaagctgacaccagactatgatgctcttgacgtggccaacaggatcggcatcatataagtcagagggacggtcctgcagtaggcgcatgtgtcgtggtttcgtaagtgagtggagttttgtacttgttacttagcaaaggggctcaatggctccattgcctaccatatcgccgcgcaacttcatgaatttgatgcaatcgaaatgacctgtgttgatacacgtgg

SEQ ID NO: 10276 - DNA, 365 bp, Triticum aestivum
  Clone ID: LIB31-004-Q1-E1-C4
gggtccagtgcgaccaaagcaataaccatcatctcatcgaaagacgggacacctttgcctctatcaagtggtatcagatttccaggttgctcggtgagattttacagtatttcgtagtttagatcgagtctgttcttcagacctacagtccacgaaaaagccacaaggaaaagtttagggttagttcatcatatccgaagcaatctgagcctttgcataagctttttagggttttgctttgttgaagttgcggttgcatcgtcgtgtctagttgctgggcttagagtctagtcttttagagtttcgagttctggtcataagttgtcatgccgccgccgcaccatcatcatcggccctgccatcta

SEQ ID NO: 10277 - DNA, 414 bp, Triticum aestivum
  Clone ID: LIB31-004-Q1-E1-C7
ttcccgggtccacctatcatcactgactatggtgttgcgacgacaatttgttcaagtgcaaccttcagtttgctaaagcatctgccaaagagaacaagaaatcgcttgggttagacttcaacccaggtccatctgctcctcgggatgatggcacccatgatgctgaacccaatattatcgggcccttctacaaccttgaaggtctcatatcacacattgttgttcagggggcagccgtggagcactctgcagatgacactgattctgatgaagcgcctgctcctcccaagccatagaaacagaagaaacaaaggcttcaaaaccctcctctgcaccaaaagcttcgcatgttaagcctctagctactgcacctcctggaagcagtgtgcagtccgaagatctctcatgcatctc

SEQ ID NO: 10278 - DNA, 390 bp, Triticum aestivum
  Clone ID: LIB31-004-Q1-E1-D3
ggtccagaccctacctctacatctatcttcgggattagttttagacctgaataattgttatttggtgccagcgttaagcatgaacattatatctggatcttgtttgatgcaagacggttattcatttaaatcagagaataatggttgttctatttatatgagtaatatattttatggtcatgcacccttgaagagtggtctatttttattgaatctcgatagtagtgatacacatattcataatgttgaagccaaaagatgcagagttgataatgatagtgcaacttatttgtggcactgccgtttgggtcatattagtctaaagcgcatgaagaaactccataccgatggacttctggaatcacttgagtatgaaccacttggtacttg

SEQ ID NO: 10279 - DNA, 332 bp, Triticum aestivum
  Clone ID: LIB31-004-Q1-E1-D4
cgccatcaagcttacgccgcagaatttgctgcccccatgccacctccggggcctggcttgcatactcatgaccagcagtcgaggaagacaaggcggtgctggtcgccggagcttcaccggcactttgttgccgccttgcaccaactcggtggccctcaaggtacttgagccataacttagccaaatgctagctgtatgtgctactctagttggcacattcgaaaaatattggagtccttacaaaaatgttccacgatgattgcagttgccactccagagcaagtcacggagattatgacacttgatggcctcaccaactatgaagtgaaaag

SEQ ID NO: 10280 - DNA, 286 bp, Triticum aestivum
  Clone ID: LIB31-004-Q1-E1-D6
gggtccacagacaatttggaaggataggatcgatgctcacagcagattgatgaggcactattttgtggagaatctgacataccccgagtcgtacttttgtcgccggtttaggatgagcactgagttgttcaggcgcattacagagaaactaacgagccatgacccgttttttcagcaaaggaggaatgccgccagagagctcgggcataacacctttcagaaggtgacagccgctttgcgtatgttggcatacggtatcccggctgatctagttgatgatcacttg

SEQ ID NO: 10281 - DNA, 393 bp, Triticum aestivum
  Clone ID: LIB31-004-Q1-E1-E1
gggtccagactgcattagaaacgtatccttcactgccaccacagtcgatataaattagctgtccggcagactttccaatgaatccggagaaacacggattaacactttctacaactggtagcgggatgattctccatcttagcccttctgcatcaactattgccaacccaaactgacctaccagcaagtggtgtatagctaacaaaattatgtcaaggagtaaggatataaccgtaggtaattactagtaagagatagtagaacagttcaatgggtatgcaaggttttagtaggtgatatgcatcacattattcagcggaacacacattgacaatagaagttacatgctaagagcagtatataaccaatcgatgcagcaaaagtagttcaacc

SEQ ID NO: 10282 - DNA, 301 bp, Triticum aestivum
  Clone ID: LIB31-004-Q1-E1-E11
cgcgccggacctcggaacgcactaaagtgagtcgtactacttctttgttgatttcgggaccgagcctgaaggtccctccttggcccatgagatgagatatcctggtggagactgcacctctgacatatggatctaggaggaagggtgtacgacacaggcagctggagatccatggtgttgagctcactgtaattaaaatggtctcgtccccgcctgcggtgttggctgtgatgtggtatcaagtgggcaaacttcctgacagaacctctgacattggcttcatgggatctttgggccctaa

SEQ ID NO: 10283 - DNA, 421 bp, Triticum aestivum
  Clone ID: LIB31-004-Q1-E1-E2
cgggtcgaggtccatcaatattggttgtagatgtgagttgttgctgccatggaggcagatacttctgggcctcttctctctccgacactgtgtgcacgtgctcatcgcctttctagccagaaagattgaacacgtttatttctagaggctataaagtttttcttcatccgaattgatctatggcattggaggacacgtggtttcccaatccctgcaaaaaacgatatctaataacctcctccttgacgatctgccatggagcttttaaaaaaggactactatgctgctaataacaaaaattaaattgcattaggattcatgaactacttattttcatcttatatatgctgaccttctccttcttttagtgaaaaatcatgcatgtgcccttcgtgttatattactgttacctttcatacac

SEQ ID NO: 10284 - DNA, 434 bp, Triticum aestivum
  unsure at all n locations
  Clone ID: LIB31-004-Q1-E1-E4
gggtccagtctcggtgagaatggacattcacttggaaagatgggtggacagattaatggacacttgaattatggatttcatggggttggagctttcaatccacattcccttcctgactttcgcaacggccaaagtaatggtatttcttgcaacttaggcacaatatcacccattggagttaagagcaactctagaactgctgaaggaatggagagcagacatctttacaaagttggttctgctaaccttggtggtcattcttctggtcataccgaagcacccgggttttcaagaactggaagctgcccccttcatggccaccaagtagcgtggaataattcanataactcgcatcaccatacctcctctcgcatgctatggacgaactcaggatcatttatcaataatataccatctcgacctcccatgcaagc

SEQ ID NO: 10285 - DNA, 423 bp, Triticum aestivum
  Clone ID: LIB31-004-Q1-E1-E6
ttcccgggtccacaaaagtggagccaaacaggcccagaccaacaacatgatacacaaaaacaaacaatgacaagcgaggcgggagatagagcgcttacacgaaaattatgaaactaaatcaaaagaatgacaaacttagacgagacatcgtttaaaatagttgtggatttaaaaatacaatatgaaattataaaaatcaaggattttacgaccaaaaaagaaacaaaatacagaagtttaaaacccaagagaaaaatttagaaaaaacagacaagaaaaaaaacagaataagtgagtatagagagtggcgaaccaggaaatacttgaaaaaaatgctcgcctctgacacttccaattctttcccgaagcataaagacaaaatatgcctactccccaaacatacatagacaataaagaccagcc

SEQ ID NO: 10286 - DNA, 412 bp, Triticum aestivum
  Clone ID: LIB31-004-Q1-E1-E7
ggtccacggagaagaaacagttgaacacgatgcgggagatcaaggtgcagaagctcgtcctcaacatctccgtcggcgagagcggcgatcgcctcactcgagctgccaaggtgttggagcagctgagcgggcagtcgccagttttctccaaggcgaggtacactgtcaggtctttcggcattcgtcgtaatgagaagattgcctgctatgtgacgatcaggggtgagaaggcaatgcagcttctcgagagtgggctgaaggtgaaggagtacgagctcttgaggaggaacttcagtgacactggttgctttgggtttggtattcatgagcacattgatcttggcatgaagtatgacccatcaaccggcatctatggtatggacttcctcgtggttctggaacgagctggata

SEQ ID NO: 10287 - DNA, 227 bp, Triticum aestivum
  Clone ID: LIB31-004-Q1-E1-F1
gaatggcagaaaacagcaatgtaaaatgacagactacgtggtgacgtcatttacgccttcagttccatcatgtgcttgctgctgggcctcgcattacaaaatcgcctgacaatatcatacagttggatttgttccttcgtagccctgacttcaggctcgtaatcctccgcggagggtcggttaaactaagctctgctgccctcaaagaaccaaggggtggcactcct

SEQ ID NO: 10288 - DNA, 434 bp, Triticum aestivum
  Clone ID: LIB31-004-Q1-E1-F2
ttgaataaacggtcgatttccgattaatctctattcctcggctgactgagacgctaacaataagcgatatcctcaatattgacgtaaataaataaccgcacccaaaaacaggaacgggtgtggcctatggcgtcgccccattacttgccgcccgcgggcagcatataggattggaccgtattaaaggcattttctatttgacgcttcaggcgcccattactgtgtatgttgcaaacaggcacacaccctcctctgcgctgcgctggcccatttagcctacccaaacttgcgactaagtccatcaaaccggagatctccttgtattcgataaatggcactaaccacccagaccccaatgcctattgtgatcacttctcctttttcttccttttcttccttttttccttatttttttacttttactttacattttc

SEQ ID NO: 10289 - DNA, 450 bp, Triticum aestivum
  Clone ID: LIB31-004-Q1-E1-F3
ggggccaggcacgtcgattcacattgaataaccttggttctgtccaaacatagctgtatgaaaatgatatagcatgaaagaatcatgtctactaagtaaaaagagaaagaactaaaacgtaaagcggatcatgtatagaaagtacgaagaaggtgaatggtaaaaaagagcaaggcaaaatgagagattatgtggtgaggtcatttacgctttcagttccttcatgtgcttgctgctggccctcgcattacaaaatcgcttgacaatatcatacagttggatttgttccttcgtggccctgacttcaggctcgtagtcttccgcggggggtgggtgaactaccctctgctgcctcacagaaccaggggtggcactcctaatggtatcctcagataccgtatctgcaggcacattgaaacttgattgcccctgacctcgtgaggacctcct

SEQ ID NO: 10290 - DNA, 273 bp, Triticum aestivum
  Clone ID: LIB31-004-Q1-E1-F4
attgctgaggcaagagatcagctccacaagatgctgaatgaggatgagttgcgcaatgctgtattgcttgtttttgctaacaagcaagatcttcccaatgccatgaatgctgctgaaataacagataagcttggtccaaaacccctgcgttagccacactggtatattcaaagtgcttgccccaaaagtggggaaggtccgtatgaagggttggactggctccccaacaatatacccagcaagtcctgaaagcttccaatggattggcaaagc

SEQ ID NO: 10291 - DNA, 358 bp, Triticum aestivum
  Clone ID: LIB31-004-Q1-E1-F5
cgcaactcactaaagtgagtcgtagtaccgtcgagacacagctgtacgcaaatgatataccatgaaagaatcatgtccactaactacaacggagaaagaactacaacctaaagcggatcatgtatagaaagtacgaagaaggtgaatggtaaaaaagagcaatgcaaaatgagagattatgtggtgaggtcatttacgctttcagttccttcatgtgcttgccgctggccctcgcattacaaaatcgcttgacaatatcatacagttggagttgttccttcgtggccctgacttcaggctcgtactcttccgccgggggtcggtgaaacacactctgctgcctcacagaaacaagggt

SEQ ID NO: 10292 - DNA, 388 bp, Triticum aestivum
  Clone ID: LIB31-004-Q1-E1-F6
cggtccacagtctaagagaaaacaggagtatagctgctcataccgtaattctcctgatgcggaagtagagtattagaggtatactacataatacatgaattgtattgtattgtactgttgctgtacaagacgtgttactacactatccctgtggtctagtcaacatggaatcttcagggaaagtagtaaagctgagtacaatgaagagaaatgtgtagccagcttgtgtcgcattttagtgctccaaaattgtattcttgtcttgcatggtgctatatagcaatcattttggaacttcttgtcaatttcttccggaccttaagaatcattcacatattatactgcagtatactggtaatagctttttacactttaacaactctaactt

SEQ ID NO: 10293 - DNA, 440 bp, Triticum aestivum
  Clone ID: LIB31-004-Q1-E1-F7
ggtccactgcatccagagacttcaaccttctgacgctcaacaccatacagacagccatagccagggcatacaaaactcatttcgagcaacttggctaatacaaagcttatgcgttatccgaatcaccttcaaagcgtacgacaatagtgcaagtaactatctgtcattcgctatccagtagattaggtgtcacgtcattgacactatcactgccttcatgtcattgctgctagaccgcacattacatcatccgtgatatatcaacagtttgctttattcacatcgctcgaccttacgtcacgcacgtattcttccgcatgaggtcgatgaactaccctctgctgcctcacagaaccagcggtggcactcctagatgtatcctcagataccgtttctgcaagcacattgaaacttgattgcccctgacctccttaggacct

SEQ ID NO: 10294 - DNA, 212 bp, Triticum aestivum
  Clone ID: LIB31-004-Q1-E1-G10
ccccggtcgacctatcaaaggcaactcatgtctaataagtggatgtcatctgtcccaccggtgacgcagcacctgtttcctgcatcgattgagcagtttacaagtgccaaatccccactggctccggttgttcacaggttatctgatccaatagccgccgcagcaccctcccggtctacgctaatgtggaacgcccgctgtacgtcatcctg

SEQ ID NO: 10295 - DNA, 322 bp, Triticum aestivum
  Clone ID: LIB31-004-Q1-E1-G4
ccgaaaagaaaaagattaaggccgctgtcaagaaaatgtacgacattcaggccaacaaggttaacaccctcatcatgcctgatggcaagaagaaggcgtacgtgaagctgacaccagactacgatgctcttgatgtggccaacaagatcggcatcatataagtcagagggagggtcctgcagtaggcgcttgtgtcgtggcttcttgtgttattggaattttgtacttgttacttaccaaaggggctcactggctccattgcctaccatatcgctgcacactttcatgaatttgatgcaatcgaagtgacctgttgttgagc

SEQ ID NO: 10296 - DNA, 397 bp, Triticum aestivum
  Clone ID: LIB31-004-Q1-E1-G5
cggtccaccgtccaaacagagtgtgataggggcttttgatcttgaccacttcaaagttcaatgtttctgccctatagtcatattcattgccaaaagccacttccaaggctatcttaccaactggatatgctgacttaccaggcaccaccccatgaaatactgtagaggacggcttaagatctttgtcggtcaaattcatacggtgaaaagtatcatactaaaggatattgatactactgcctccgtccataagcaccttactgaacttgtagcccccagcctgaggggctacgtaccaccaaagccagctgccccggattgccaacctggggccggtgatcctcacgggtccatacaattggctgctctgaccatcgcgggtatcgaggcactgccg

SEQ ID NO: 10297 - DNA, 249 bp, Triticum aestivum
  Clone ID: LIB31-004-Q1-E1-G6
acggctacagcccaatctacacgccacaggaatggtctgaatctggtgaccgctacgccggcggaacgaccgggcttcttatctgggccgtcaccctcgccggcctcctcggcggcggcgtcctcctcgtctacaacaccagcgctctcgccggctaatagagcatctacgttttacaacagggccgggtccctgcttgcatgcacgtctctgtaatccacatagctacctcctgtgaatgtatgcaat

SEQ ID NO: 10298 - DNA, 144 bp, Triticum aestivum
  Clone ID: LIB31-004-Q1-E1-H11
cgccggtccacgatatccactcaaatgggtcgtctcccgtgctgatcgcgagctagccgcaattaaggtctcccccgcggctttacatgacctatgactgtgcgcatctacccattatagcaactatgtgcagcgtgaatctag

SEQ ID NO: 10299 - DNA, 347 bp, Triticum aestivum
  Clone ID: LIB31-004-Q1-E1-H4
ggtccacgagatgacgaaacgcaccaagaaggctggtattgtcggcaaatatggtacccgttatggtgccagtttgcgtaagcagatcaagaagatggaggtgtctcagcactccaagtacttctgtgagttctgtgggaagtttgctgtgaagaggaaagcagttggaatttggggatgcaaggactgtgggaaggtgaacgctggcggtgcttacactatgaacactgccagtgcggtcactgtcaggagcactatccgtcgtttgagggagcagactgaagcataagttgctactagtgttttgtcctagtgaatcatctgggatttcgcagtttagacgatac

SEQ ID NO: 10300 - DNA, 426 bp, Triticum aestivum
  Clone ID: LIB31-004-Q1-E1-H6
ccgggtcgacgagaggatggaaaacaggcacgaagatgaccttcctagaaggaacaatctgattttttcgtcttatttgcagcgtaaactatgtatagtaatcattagaccatctttgaagatctgacgaacagaagcagaatggttctttctatactgttcgacccccctctccccccccccaccttgcgttctctcgcagggagtggctagcgcgcaacactgccatgctcctctgctgctccgtcatcacagggtgggacggcgacctcgccttcctgttcattgttctgtcggtaacgacgttctttgtccaggatcatccggacagggaggtcctccaggccatgcgtctaggcatgtactgcaacgccgaccacatggccaagatggtcgttgcggcaaccgagttccgtgctctccgtt

SEQ ID NO: 10301 - DNA, 346 bp, Triticum aestivum
  Clone ID: LIB31-004-Q1-E1-H8
attaccaagggagcagcagagccttgtcacatgggccaccccaagactgagtgaagataaggttaggcaatgtgttgactctagacttggaggggactatcctcctaaggctgttgcaaagtttgcagccgtcgcggcattgtgcgtccaatatgaagccgacttccggccaaacatgagcatcgtcgtcaaggcgctccagcccctgctgaatgcgcgagcagcccaccccggggctgagcatgccggacgctaagcaccactccggccttttgtatgatatagataaggaaaaatgagccatcaattgttgttcttgctgggcacttgtcaggcggtttttgta

SEQ ID NO: 10302 - DNA, 392 bp, Triticum aestivum
  Clone ID: LIB31-005-Q1-E1-A8
ggagggagcagttgtatagtgagaacaagggcgttgaatgggaatcgcctacatcaaatttcaagcaccactgtctggccaagttcatcctcgtcggctttcaagctaaagactacatggtgagtcatgtcaggcgtgtcctgaaagcagcggtgaatctacaggatgtctacctgtatgatagactggtatgtgccaagtgccaagagaaagtaaagaatgcgcgcaggtatgatgcactggtacgtggcatatgcccaggcgtgaatctgcctataaagttcccatgtacaaacgaggaccagcgtgcagtgcagaagcgaatgccccggggcattgggtcacttgccaaaatccacttcctgtcatctaataaaataaaggctgaacat

SEQ ID NO: 10303 - DNA, 413 bp, Triticum aestivum
  Clone ID: LIB31-005-Q1-E1-B1
cgggtcgactcccatggaaaacgatagccaccatctcatcgaaacatcgggacaccttagcctctatcaagtggtatcagatttccaggttgctcggtgagattttacagtttttcgtagattagatcgagtctgttcttcatacctacagtccacgagaaaagctaaaaaaattagggttagttcctcatatccgaaccaatctgagcctttgcataatctttttagggtttttgctttgttgaatttgcggttgcatcgtcgtgtcaagttgctggtcttagagtctagtcttttagagtttcgagttctggtcatacgttgtcacgccgccgccgcaccatcatcatcgcctagctagcacttttgcttatccgccacggctctgaatccatatcgatataccaccacca

SEQ ID NO: 10304 - DNA, 341 bp, Triticum aestivum
  Clone ID: LIB31-005-Q1-E1-B10
ggagcgcaagacggtggttgccgatgataccatgccaagtggccatgaggtgtatgccggtgatgccatctacatctctctctactccatgggaagaatggagagcttgtggggtaaagactgcctcgactttaacccagacagatggctcctgggggatagcaacaagctcaagtatgtgccgtctaacaagttcttggccttcaactcaggcccaaggatgtgcccaggcaaggaaatcgcagttgtgcagatgaagaccatcatcgccgcagtcgtgtggaactttgacctggagcttgtggaaggccagagcatccaacccaagctatcttgtttac

SEQ ID NO: 10305 - DNA, 354 bp, Triticum aestivum
  Clone ID: LIB31-005-Q1-E1-C10
ggtcgacgtccatgtaaacgatatctagcatcacatcgaaagacgggacacctttgcctctatcaagtggtatcagatttccaggttgctcggtgagattttacagtttttcgtagtttagatcgagtttgttcttcatacctacagtccacgaaaaagccacaagaaaattagggttagttcagtatatccgaagcaatctgagcctttgcataatctttttagggtttttgctttgttgaatttgcggttgcatcgtcgtgtcaagttgctggtcgtagagtcgagtcgtttagagtttcgagttctggtcataagttgtcacgccgccgccgcagcatcatcatcgccttg

SEQ ID NO: 10306 - DNA, 349 bp, Triticum aestivum
  Clone ID: LIB31-005-Q1-E1-C12
tagcgtctagaattctagggtcgacgggtctgccctaaattcaagcattgcacacttaggctacccagctgtcaacgacgggacatggcatttttgccaatccgagatgacattaagtgacgttgaccggaatatgtcttaataagctgccaccagtgaacaccgttgaaccgtttccaacaacacaggtctcgacaatgattcaacggtgggcagtgaaaccgcagaagcccaagacgcaagcttcgccaacgcgtgaccggtgacaagaccgctcgggaataaacgtgtacgccctgacagctgacacggcttcaccgatgggaagggggagcacaggcaagtggcc

SEQ ID NO: 10307 - DNA, 371 bp, Triticum aestivum
  Clone ID: LIB31-005-Q1-E1-C2
gggtcgacgcgttggcatgccgaaagacatgccagctgatccgcgcatcacaattaaaagggcagtgcgctgcagcagatgtaaaggctatggtcacaacaaagcaacttgcaaaattcctatcagcggcgaagccttgccggccttgccaccagctgagctctccgatgtacacaataaggtggagagttgctcttgatgttccctgtaagcaaatgctgctatttctttcgttgggaacctgcggcatggtagttgattctagctccaagttgctctgtagtattcactgttttgcttacgctagcgacatttgtttggtaaatcaaacattgtgatgtgaaccattagagaaacatgggaaattctgc

SEQ ID NO: 10308 - DNA, 298 bp, Triticum aestivum
  Clone ID: LIB31-005-Q1-E1-C3
gggtcgagacacataacgaggcaaactgctaggctcatcaacagtttgatggcggaacgcaagtcgtacgagatcctcctcttccctgatgataggcacatgccacgccagctatacgaccggatctatatggaggagaggatctgggattttgtcgacagaagcctatgacagtgggagaaaattcatctgtacaaatctgctgttgccctgtgtgactttaaggtggatagttgggatgacatcgtggacgtcatttcagttcccagcatcctgtatttatccgcaagtgcacgga

SEQ ID NO: 10309 - DNA, 427 bp, Triticum aestivum
  unsure at all n locations
  Clone ID: LIB31-005-Q1-E1-C9
ggccgaccatggcgtctaccaactccgggggcatccccatcaaggccgaacaggattcggatggctcggcccagagcacagctgacatgactgcttttgtgcaaaatcttctagttcagatgcaaaccaggttccaaaccatgtcagagaacatcatcacgaagatagatgaatgggtgcaagaattgatgaattggagctgagcatcaatgacctcaaggctgaaatgggcancgatggtatgacccctactaaagtgaaggacgaagaatcaaagccagcagacagcccttcctgagtgaagcagaagtagcagaagcaaggcgtattagtcgtggttccatgtcgatatcatcagccattcatcactaacttactgcatgttaggagatgttatttgcactggttatatgcatatggagatata

SEQ ID NO: 10310 - DNA, 318 bp, Triticum aestivum
  Clone ID: LIB31-005-Q1-E1-D1
cgggtcgactcattttttggctcaatcgaatatgtgaccccatactcattatagttgagcggcaaggagggtgaaatgcaccatttttcatctctccaatgattgacgtgtttgccgaatcgcaacccgagcctactcatgtgtcgtcctgacctgacctaaaacgtgcgagatctatcacaagcattggctctggtggattggatgttcatttccgggcccaacccgacatctcttaccgatacgtccagtgtcagctttgccacatgcaagctaatcagaagcatcagaacctgtaatgcataatgatcggcagtg

SEQ ID NO: 10311 - DNA, 313 bp, Triticum aestivum
  Clone ID: LIB31-005-Q1-E1-D10
gtcgactccaactgcaactccaagtcttcgacgtcactgcaactctatggtgttttatgagagagcgaatagttgcatgtctgctactacgcagacaactgcaagtgtcaccccaggctgttgctccatggtgttttgtccggaggggcagttgcatgtgtgccactaagcatgcatatgcaagtgttcccctgactgcaactctgtgttgtttttgttgggggggcgacgttagttgcatgtttgtcattaagcacacaactacaaatgtggacccatattgcaactggatgtgttcaatgtgagtgcaact

SEQ ID NO: 10312 - DNA, 393 bp, Triticum aestivum
  Clone ID: LIB31-005-Q1-E1-D3
ggtcgagcgccgaagacgacagaaaggtgcgtcctttcaggggtggctagaggctgtggatggcagaagattggtgcttggatcaatcttggtgcctactatattgtcggcatcccctcggcctacctcatagccttcgtcttgcaagtcggcgggacggtacatcaaatgataaataagaaagaatcccttttcctgccctgaatttgtagtgagttcatatgtgccagtggtttttgagtgactgatgctgtgggttttatcggtgaacacgaacagggactttggctgggcatcatctgtggcctgatggtgcaagtcctgctgctcatggccatcacgatatgcacagactgggataaagaagcgggtaatgcaaacgacagggtattc

SEQ ID NO: 10313 - DNA, 431 bp, Triticum aestivum
  Clone ID: LIB31-005-Q1-E1-D4
gggtcgaccaggccatcgtacggatgtcgcttgttgacacagacgcggccttgccggcagacaggcatcctgagcgccgcctcaaggcatcattcaaggcatttgaagaggcagagctccctaggctgaaggaagaaaagccaggcctaacactgaaacagtacaaagatatgatatggaagctatggaagaaatccccagacaaccctctgaacaaggcaactgagtgaggatacagtcccagtttcgtaccgattgatatggattctaaggcatccaatggaacagaactgcagctgcctcagtatctttgtccgtggagtgaaatgatgtgtggcatagcttgaaccaaatactcaagcttctcagctaataatcaacagatcaatgcaatgtatattctgagggtttgcttttgattagagagattt

SEQ ID NO: 10314 - DNA, 371 bp, Triticum aestivum
  Clone ID: LIB31-005-Q1-E1-E1
ggtcgagtctgaaaaactcagaaatggtgagatccagtgaaagacatctcatccttgtgcgaggttaatcaaattcaatctaaggagaagattctgccatgacaaagccaaaggccacacaaatcccatctcaaagaaatatccggagaggatgagctgagcacatgcgcctgcattccagatgctcttaccaatttaccatgcaactcaacgaccttgaatccttgatagcacctacgagagagctacccatacaatccaatccaatccaatctgcggctaaccaactgcgcgaatattttctacgcttcttctacaatctcagacggatcgctctgcaacaaggatcgacataactggcgtggggcgat

SEQ ID NO: 10315 - DNA, 392 bp, Triticum aestivum
  Clone ID: LIB31-005-Q1-E1-E11
gaagacctctgttctttcccttgcgcacgaacagcccctccgacggcggcgaggcgggcgaattggcatcctccctcctcgactcgacgcgcgcgtaatccgagactaccttcaagaggacaagatgctgtggcgcacgattcgcagtatggaggtgatggcgcattcttctagtttccttcttccgaaattgcatcagcctgccaagactccagcaaacaactatactctggttgttcttaaccagcagcttccacggttcatgcctcgcctctgggctcaagagcagcaaagatgagaatatgtgctgatggtggagccaatcgtatttttgacgagatgtctcaaatgacaaatgacctggacagaaataggtatattccagaaatagt

SEQ ID NO: 10316 - DNA, 331 bp, Triticum aestivum
  Clone ID: LIB31-005-Q1-E1-E3
ggtcgggaccgagccggatgcgaatgtcaagcaggcgatgaatgagatcaatgcagctgcaaggatgagggtggctgcaaacgagaaggcggaggctgagaagattgtccagaccaagcgtgccgagggtgaggcagaggccacgtacctgtctggcctcggtatcgcccgccagcgccaggccattgtggatggcctgagggacagcgtcctgggcttctcagtcaacgtgcctggcaccactgcaaaggatgtgatggacatggtgctgatcacccagtactttgatactaggaaagagatcggcgcatcctccaaatcctcgggcggt

SEQ ID NO: 10317 - DNA, 438 bp, Triticum aestivum
  Clone ID: LIB31-005-Q1-E1-E4
gggtcgacacgatggttgcatggaccaaagatatcaaggtgtcagacccgctcgaggaaggttgcaggcttgggccagttgttagtgaaggacagtatgagaagatcaagaagtttgtagcgaatgctaaaagtgaaggtgccaccattctgactgggggtgtcaggcccaagcatctggagaaaggtttcttcattgaacccacaatcatcactgacatcaacacatcaatggagatttggagggaggaagtctttggtccagtcctgtgtgtgaaggaattttctaccgaagaggaagccatcgaactggccaatgatactcattatggtctggctggtgccgtgatttctggtgaccgtgaccgatgccagagattagctgaggagatcgacgcggggtgcatctgggtgaactgctcgcagccttgcttctgcc

SEQ ID NO: 10318 - DNA, 335 bp, Triticum aestivum
  Clone ID: LIB31-005-Q1-E1-F1
cgggtcgacttccaccagagcgaaatccaccatctcatcgaaagacgggacacctttgcctctatcaagtggtatcagatttccaggttgctcggtgagattttacagtttttcgtagtttagatcgagtctgttcttcatacctatagtccacgaaaaagccaaaaaaaaaattagggttagttcatcgcatccgaacgaatctgagccttgcataatcttttctgtatttgcgttgttgaatttgcggttgcatcgtcgtgttcagttgctggtcgtagcgtcgagtcgtttagagtttcgagttcggttcacaagttgtcacgccgtcgcgg

SEQ ID NO: 10319 - DNA, 356 bp, Triticum aestivum
  Clone ID: LIB31-005-Q1-E1-F12
catcgagtagaccctgttattgtgagaattcttaattcaagagttatagggagggacttatgtcaccacaaacagaaactaaagcaggtgttggatttaaagctggtgttaaagattataaattgacttactacaccccagagtatgaaactaaggatactgatatcgtggcagcattccgagtaagtcctcagcctggggttccgcccgaagaagcaggggctggagtagctgccgaatcttctactggtacatggacaactgtttggactgatggacttaccagtcttgatcgttacaaaggacgatgctgtcacatcgagcctgttggcggggaaaacagccaatgggtctgt

SEQ ID NO: 10320 - DNA, 389 bp, Triticum aestivum
  Clone ID: LIB31-005-Q1-E1-F8
tgcaccccaaatggttcccgggaatgccagtgtgctaaatgctaatggttctaatgcccctaatggaagcttgccttcccatagctggcctaatctaggttatcagaaccctgcatctattccagcagcagcaccacaaaatggtgtcgccaaggctgggaacaacaatcaggacttcttttctgggaacttcggttttggttcgcccggcatgccagcaaatgggtccacaaccgcaggtgctaacaagagcgcatccacccctacctcttctaccctgccctctcaatcaggcaaagagtatgatttttcctcattaacgcaaggaatgttctcgaagcgatgaatggcttgaaatacttggagatggatgaggcctccattgggcg

SEQ ID NO: 10321 - DNA, 418 bp, Triticum aestivum
  Clone ID: LIB31-005-Q1-E1-G1
cgggtcgacgcagcagaagccatgaggtcaggggactggttcaagaccatcatcagcaagaagaagtcgaaacggggcaagtcaaagcacgcaaagaacgttgctgcgcaacgcaatggagccaacctgccgcaggaaaagcccagcaacgctccttcttccagcagcgagcctgaggacaacgcagcactggaagactgggcagctacccggattcagaacgcgtttcggcgccacaatgcaaggaggacgctccgttgcctgaggggagttaaaagactgcgcattgttggccagagcaatccagttaccaagcagaccagtgccacactgagctacatacagtcttgggacaagttacagggctgagctaagaaaagcggcgtgctttcaaggtcaccgaacggcgcaccaggaa

SEQ ID NO: 10322 - DNA, 418 bp, Triticum aestivum
  Clone ID: LIB31-005-Q1-E1-G10
attctagggtcgacttccaccaaaacgaaatccaccatctcatcgaaagacgggacacctttgcctctatcaagtggtatcagatttccaggttgctcggtgagattttacagtttttcgtagtttagatcgagtctgttcttcatacctacagtccacgaaaaagccacaaaaaaaattagggttagttcatcatatccgaaccaatctgagcctttgcataatctttttagggttttgctttgttgaatttgcggttgcatcgtcgtgtctagttgctggtcttagagtctagtcttttagagtttcgagttctggtcataagttgtcacgccgccgccgcaccatcatcatcacccctgccatctaccaccaccgcttttccgccagcgcttcgaatccgtaaccatataccaac

SEQ ID NO: 10323 - DNA, 447 bp, Triticum aestivum
  Clone ID: LIB31-005-Q1-E1-G3
ggtcttaaatacccgggtcgacagacgacagaaagggacgttgactggcaagaccatcacccttgaggtggagtcgtctgacaccatcgacaacgtcaaggccaagatccaggacaaggagggcattcctccggaccagcagcgcctcatctttgccggcaagcagctggaggatggccgcacccttgctgactacaacatccagaaggagtccaccctgcaccttgtcctccgccttaggggaggcatgcagatcttcgtcaagaccctcaccggcaagaccatcacacttgaggtggaatcctccgacaccattgacaacgtcaaggccaagatccaggacaaggagggcattcctccggaccagcagcgcctcatctttgccggcaagcagctggaggatggccgcactcttgctgattacaacatccagaaggagtccaccct

SEQ ID NO: 10324 - DNA, 341 bp, Triticum aestivum
  Clone ID: LIB31-005-Q1-E1-H1
gggtcgagcgtaaagttgacgcaggagctaacccaaagaagaaaaaagatgcagccagtgccaatctatagagcacactgctagtgtgtgtccactcaggctgctgttattcacattcatcgtttgtaactttgggactaaacaggaaaagaatgctgggttttgagcaatgttgggactaagtacagcacattcagcatgtatgctttctcatatcgaatttatgcgccgtggattaattcactcactgtgataagaacgttgctaattgtgcctttggtggaacagggttactaatttaattgttggagaattgtatttccaagtcgctccgaagtgtg

SEQ ID NO: 10325 - DNA, 378 bp, Triticum aestivum
  Clone ID: LIB31-006-Q1-E1-A11
ggattcatcaaaaagctggcgtcaggctggatctgatggaagtagtcagctcaaactgaaagagccatctaccaatgtggtcttagctgatcatgttaccacgaagaaatggtagcaagttgttgatttcgacgaccacctcgatgatatcagcaagtaagtggaagagtctacaagtgtcatgaagctatagtttgtaataccccacaaagaagttgtacttctttttaataaccatattgagtgcttcctttcctctgtttacattatttccccttgcatatttgcagggactggttgaacgcaagcctgcttggttgacacggttttgagatcaactttgtcacatatttatttgaactggctagaaacaaggca

SEQ ID NO: 10326 - DNA, 406 bp, Triticum aestivum
  Clone ID: LIB31-006-Q1-E1-A4
tagccgtcttaaattctagggtcgacaatttaaacgacgtgctcaacttcaactccggagacatcgacagcatgaatgaagatgcaggagataccgacgaaccaacgcccatagggcattggacagccacctcatctcacgatgtgtacatggtggatacccctaaaggaagcgacaacgaggaaaaaggggatgggacgggagatcgaccccccgaaaagcaatcaaagcgtcggcgtaaacaccgacccaagccctgcctcaacaaaaacccagccatagagcaagacgagccggtaaacgactggcatgctttagagcaaccgtctgaacaaggaaacacgtatagagaaaccgaacatccctcctcgggcgaaaacggcgacctcacaccacataaacctac

SEQ ID NO: 10327 - DNA, 441 bp, Triticum aestivum
  Clone ID: LIB31-006-Q1-E1-B1
gtcgacggaccgttaattactttgattgaatatgatccttttcatggttatgaaactgaaactattgtggcacatcttactaagttgaatgatatagccaccctttttactcatgatgagaaaactcgatactactttattctcaaattatcccctttctcattaaagggttatgctaaagcttggtacaatattcttgctcctagttgtgtgcgtagtccccaggatatgatttattacttctagaaaaaatattttcctgctcataagaaacaagctgccttacaggaaatatttaactttgtgcaaactaaagaagagagtctcccacaagcttgggggaggctttgccagttacttaatgctttgcttgatcatcctcttaagaaaaatgagatacttgatatcttcaataatgggacaaccgatgcttctcgggac

SEQ ID NO: 10328 - DNA, 451 bp, Triticum aestivum
  Clone ID: LIB31-006-Q1-E1-B3
attctagggtcgactcatcgactcgaaaaccttgtcggcaatataatccatgtggtgtcaatcagcatgtgggaaacaatgtccatgtcctataaatggggcatgctgtgagaaatattgtgggggacaatcccaacaacaattgcaggtactttagcgttgtctctatgattcatgcatgagttgctggtgttgtcattttcaattcagtgttatatcatttaacaatcacaatccagtcagtaggcctggcggaaaggaattaagatgtacactggcaagaagaagatccagaaggacaagggcgtcgagacctctgaattcgaggataccatcgcgcaggggctcaccacaaatcacttgcaagaagggctcagttcgaaaactaaggttatgcttcaccaaggatttgaagggtccctcgccgtgccgtggacacgattcaaccatg

SEQ ID NO: 10329 - DNA, 432 bp, Triticum aestivum
  Clone ID: LIB31-006-Q1-E1-C1
tccagaattctagggtcgacgagcagacgacagaaggggcttccggtcaccatcggagccggcgaccggtggcagccgcgcggggacgccgcgcgatctcctacccccacccccatcccagtctaccacagcgacaccgtgtgagatccgtgcatcatcggtaggctcagttggtgccttggtggactagtgaagtgaaactgtatcaatatcttcaggctctggttcaatggcctacgagatcagtgagatcaaaaggatctgtacctttcttccttggtctctttcttcgatttgtcagatggcctgttgctggtataatcctggaactgtatggatcttttgtcctcttcagtggttacggggctcctatccaagccttcctatatcagattccaatcattggatggattctgcaatacccctttcagc

SEQ ID NO: 10330 - DNA, 413 bp, Triticum aestivum
  Clone ID: LIB31-006-Q1-E1-D1
attctagggtcgacacgacagttttggatttcatccgaaaaaatgaaatttgaacgaaatccgcccatctcgtttgggcccggtactaatataatccggtcaaaatttttggccttattcgaatttgctgctcggcccatggtccaaaaaagctgcaaccgagcctttctaggggaactcctatacgccgcattttgcggcgagtagtcgccctttcgcacagagccagctcacctgggccggcccatttgctgtagggatgggaaatcacaaaaataaaaaggctccagcaatacgactcaaacacacaacctttcagtaaggtgcgccttgcgctagccacctcaactgactacctcacatgtaaacttggcatcgcgaatattaaagaacctagctataaaacttaaaaa

SEQ ID NO: 10331 - DNA, 345 bp, Triticum aestivum
  Clone ID: LIB31-006-Q1-E1-D10
cacaggtctaggactcgcgggtcgacacggctggcgaagatgagtcatgggaatgtgcgtgtgggagacacataggcacatatatatatgtgcgtatagagggctagtagagaccgtgcgtgtgtatatatgcatgtgagagaaatagtgttttccaactaagattagttaaaagagtggtacatagtagtcagaaagagagtgagagagagggatacagagagagcatgtgcgtgagactccccgacaccccaagagagattgtgagcatgtgtgaaagagaaatgccggtgcatataaagtgtgtgcacttatgcggtagatagagagatatacaacgcgttt

SEQ ID NO: 10332 - DNA, 443 bp, Triticum aestivum
  Clone ID: LIB31-006-Q1-E1-D3
tccagaattctagggtcgacagccaaccagatgcgcatatcaagcaggcgatgaatgagatcaatgcagctgcaaggatgagggtggctgcaaacgagaaggcggaggctgagaagattgtccagatcaagcgtgccgagggtgaagcagaggccaagtacctgtctggcctcggtatcgcccgccagcaccaggccattgtggatggcctgagggacagcgtcctgggcttctcactcaatgtggctggcaccagtgcaatacgacagtgatggacataggtagctgcatcacgccagatatctattgaccactatgaattgagattggagcgtcctccatgtcctctgcggtgttcatcccccatggccctggtgcggtgcgcgacatcgccacgcagatccgtgacggtcttcttcaaggccagtctgcctctgacaact

SEQ ID NO: 10333 - DNA, 413 bp, Triticum aestivum
  Clone ID: LIB31-006-Q1-E1-D5
actcgcgggtcgacactgatcaccaagatccgtcatgctccatactgatgcataacaaggttctctcggtggttggaattttgcaagatgaagttgatcctatggtttctgtcatgaaagttgagaaggcacctttggagtcttatgccgacattggtggtttggatgcccaaattcaagagatcaaagaggcagtggaacttcctttgacacatcctgagctatatgaggacattgggatcaggcctccgaatggagtcatactatacggggaatctggaacagggaaaactctacttgcagaggctgttgccaattcgacatcagcaacattcttgcgtgttgttgggactgagttgatccagaggtaccttggtgacggacgcaagcttgtaagacaactgtttagggtg

SEQ ID NO: 10334 - DNA, 370 bp, Triticum aestivum
  Clone ID: LIB31-007-Q1-E1-A3
catcacatcgagggattcggaaccgcgcctcgatcatgtggcaccacatttccatgttgctcggtgatatttgacagtttttcgtagtttacatcaatgcagttcttcatagctagagtcgatgatcaaggcaatcatcattagggctagttcatcccatccgtgccactctgagcattgcgggatcctttctgtagttgctttgtcgaatttgcggttgcattctcgtgttcacatgctgggctgacagtcgaggctgtgatactttcaagttcagtatacaggttgtaaggccatcgctgcagtatcatcatctgggatgcgatctatcaccaccgctccgcatccgtatccatataccaccaccaat

SEQ ID NO: 10335 - DNA, 402 bp, Triticum aestivum
  Clone ID: LIB31-007-Q1-E1-A4
tccggtgggcaaaggcggcttttaagcagaggatgtgggagtgttggccacatttggttttcgacttgggtgtctaaatattctcaccatacttggctccctctcggcctttgcgtcattggcgcaacgagtcatctagttaacattcaatgaagaaaggtatgtgctactttgaaggtttagggtttagggttcatggcccagatccaacaagtgtagctttcgagagtgtgtactgaaaccaagtgtggtgttggtttctgtgaatagacatgaaaagagaagatcgcttggagcagtctgcaggttgttgtctcattcacccatgtatgtatatacaacagttgttgctggagataattgtatctataatcctcatactcgccggcgacgtccaactca

SEQ ID NO: 10336 - DNA, 454 bp, Triticum aestivum
  Clone ID: LIB31-007-Q1-E1-B1
gtacttgtcaaagcttcccgggtcgacaggtaatttcaatcattattaactatatgtcggcctctttaattcgtcatttcctgatatcaactatttaataactcatttattcattttctttgccggcgggcagggcttgggaaaatttcatcaacgtgactccaggccaatggcgaaaaaatttgtattggtttcgacccaaggtaagtaattaagtagtactagctagctaccatctctttaattcttgtttcaatactattaattgtcatgcttgattaattattatctgattaaattctattctcgtaaaggccctgaagcaggcgtcggggactgaagtgtgtgcatactacgtttgcgagaacattcgcatgatggcgtccgaaaggagcaaatgtgatagacagctatgggtacgtttgccagaacactattcacaatttttacatca

SEQ ID NO: 10337 - DNA, 242 bp, Triticum aestivum
  Clone ID: LIB31-007-Q1-E1-B12
gaccaaatcctcagcatggagatctacatactaaatgagatgcatcaatatacaggggaccactagtttgccccatcatgagtgttcaaaacctcttcttctgacaatcagtttgtgtgttccgggtgactgagctctaaaccttttattgattgggtccacatggctggtcacattttggtggtcttacgtatttgcaacaactaacttcatgcatcagttgcactcatcctctttggttc

SEQ ID NO: 10338 - DNA, 406 bp, Triticum aestivum
  Clone ID: LIB31-007-Q1-E1-B3
tacatttcagtggccttcattcaaatgctcaaggctttgatgcctgtggcgacatttataatggccgttctatgtggtactgacaaattaagacgggaccttttcttgaacatggtgctggtcagtgttggtgttgtagtttcatcatatggggagattcattttaatgtaataggaacattataccaagtaactggcattgttgcggaagccctcaggctggtcctgacacaggtcctcctccaaaaaaagggattaaccctgaatcctattacaagtctgtattacatagcgccttgcagtttcatcttcctatttggtccatggtatttactggaaaagccagaaatggacatctctccaattcagttcaattattggatatttttctcgaatgcacttgctg

SEQ ID NO: 10339 - DNA, 400 bp, Triticum aestivum
  Clone ID: LIB31-007-Q1-E1-C11
ctcaccatcataagaggaagcatgggtctcacgagtcccgcaactggtagtcaaacccatacctttaaatcttgcctcatattcaaagacttgattttggagatcatagatttgtctttgcagaaagttgatttgctcgttgagggtgaagacgacgtccttcatggactggccatccaccttgtgatcacgggtgaaatatgtaatcatgaggtgattggcgttgagtccgcgctccaccatccccttgcacttggagacctcctgctccatggcttcaagcctggcctccacggtccccttccccttgggcccctggatgtctcggatgtggagcaccccctcatgcatctcaatggcttgagcgtggtgataatcccaagtgcaaggaatcatcgta

SEQ ID NO: 10340 - DNA, 443 bp, Triticum aestivum
  Clone ID: LIB31-007-Q1-E1-C2
tccgggccgacatgcaactcgacaaaggttggcccacagttgcgagtcgaaggtggacttgcaacttggaaaaaaagtctagccccatttgtgtcgagagcgggcttgcaaaaaagacaaaaatggttggggcccaattaagaatcgagggtggactttcaactgggacaaaaaaggtcggagccccgtcgtgagtcaagggtagacttgcaattaggataaaaagtgtcgagacccggttgtgagtcgagagtgcaattgcaacagggaaaaaaggtcaggccctagttgcgactcaagggtggacatgaaactcgtacaaaaaaggctagactccagttgcgagttgagggtggacttgcaactgggacaaaaaaaagtcaggtcctagttacaagtcgatgggggtattgcaactgggacaaaaaagttcgggccccaat

SEQ ID NO: 10341 - DNA, 440 bp, Triticum aestivum
  unsure at all n locations
  Clone ID: LIB31-007-Q1-E1-C3
ccgggccgagacaggtcccagactaggcgggatagaaggtatcctgaggatgagcgcgacagtcatcatcgccgtcgaggagaagagcgtgctgcccacgacggcctctcacgctctcggttgcaaggtcggataaaacttccaggggagacatcacttgacagacttggcccacacccacacctagagaaagagagagggcatagagacaggttgtctccaccaaagcaaacagaccttcgagcaaagcttcatgataggctaaaggctagatcgaatgaggaggtccctggtaacctgaagagttcagtggtaaaagcaagtagtggtgaggatgctggggtggtgaacttttctggtccaaagagccttgcagagttgagagcaaagaaggctgcttacagatcaggaganaacactgtcaagaatgctggccgtgt

SEQ ID NO: 10342 - DNA, 396 bp, Triticum aestivum
  Clone ID: LIB31-007-Q1-E1-C4
gggccgactcccaagaaggggaagaatgtcgagctgcctaccgtcaaagtcacaaagaacagcgttggcggcggcagggtctcggtcaccgttgagaaataagcttggcttgcagcagcaggccaaccgtcgccaagtgatctaatcaagccggcggcagagaattttagcccgtggtattttgggtagtagttaatttagcacaagatattttgagtagttaattccggatgatggtgctggtatctgttagatagtttgagtgtgcctgtcctttagtttcttgaaacattgtcgtctgccctagtgcaaattcgaagtaactatacactccaattgcaaattataaatatatatgtgcctgagttatcgccatgtttgtcacgcgatctctca

SEQ ID NO: 10343 - DNA, 433 bp, Triticum aestivum
  Clone ID: LIB31-007-Q1-E1-D1
tcccgggtcgacaaaccctagacgatgtagttttgaattatgaacgtaggatatgtcgtcatcatcatcggacgacgaaagtctccggcagagtgcaactggtgccacgacgatcgaggtctgtgcgacatgcctcacctggacgatgatcggcgcttcagcattaagctcgaggagaccttcgaagttgaaacggtacacaacgacgacaagtgttattttcataattaagcatgacttcaactatttcaacgtgtaattttcatcttttacaattcgagtatagcttatcccatgccatgcaagacgctatgtcttggagaggatggattttgaagaccatgaaatttctgaaacaaagaaaattcacctaaggactcatcacgatgtggactttgaagtaaatctatataattctgagagcgtaacccat

SEQ ID NO: 10344 - DNA, 454 bp, Triticum aestivum
  unsure at all n locations
  Clone ID: LIB31-007-Q1-E1-D3
ggtacttgtctaggcttcccgggccgtaacctggatggacctcgccgccgccagggactccgacgacatctcccacaccgtcagctacagcgacatctacaggatagccaagggtgtagtagaagatccgtcccataaccttttggagtcggtggctcaatcgattgccaacaccacgctgctcaagttccctcagatctctgctgtccgagtgaaggtcgggaaacctcatgtcgcggtgcanggcgtcgtggactacttgggagtggagatactgaggcacagaaaggcatgagcttgagcagaacttcatttgggaaagcctggccaaaatgccccctcagaattgcagttgagctgatttctgtgtctcatctataaacgtgctgttgattgtcctgttactcttcggctgatgctgaaattgccgcaatcacgggaaaaagattgatag

SEQ ID NO: 10345 - DNA, 439 bp, Triticum aestivum
  Clone ID: LIB31-007-Q1-E1-D4
ccgggccgacgtcaccgagggtatcactagatttagtttgatgatgtgtgtggtgggtaatgttcactcagtcccaacctgtgtgttggagtgggtgagacaagattttaatgactaatgactacgtgtttcattaataaatatacacacagttttgataaaaaaatgaataaatatattttagcatcagcagaatggtaatattatccatgatattttgctattccacacttacatctgtctgccatgggttcctgaaagacaaacaattgtgattgaacagaggaagagcacatcactctcactcaatggctggctttggcattctttacactacacctttgaccaacaccatcccatcgtttctcaaattctgtgtagcaaaatttgctcgttgtattggtttactctaatatctcggtaaaaaaagggtatggag

SEQ ID NO: 10346 - DNA, 443 bp, Triticum aestivum
  Clone ID: LIB31-007-Q1-E1-E3
tcccgggtcgtacagatcaatgacgcccttgagacagcctgccccggtagtgtctcgtgcgccgatatcctcgccctcactgcccgtgactcgactgtccttgttggtggcccttactgggacgtgccactcggtcgcaaggactctctgggtgcagtgcatccactcgatcatacaatgacatccctgcccccaacaacaccctacccaccatcatcactaagttcaatcgcctcggtctcaacatcctccatgtcgtcgccctctcaagtggttagaccatcggcttgtctcgctgcaccagcttctggcagatgctgtacaaccagtcagacaacggtctggccgacagcacactggatatgtcctacgctgcgcaactaaggcaggggtgccaccgcatcggtgcgtacatcaatctcttcgcactctacgtcgtcagc

SEQ ID NO: 10347 - DNA, 230 bp, Triticum aestivum
  Clone ID: LIB31-007-Q1-E1-E4
cagcaggcattcatcttcggatctgcatgaactactacgcgatgagtgcaataacacccacaacattccatgcatgtctcagtcaaccatctctaactttacatgcaggaaacatgtgggactgcatgctccatcatattgggcgagtgttgtcatcactaagtcaagtgagggcaatatgaactctaacgacttaagctctacctcgattatgacatcacatatattta

SEQ ID NO: 10348 - DNA, 272 bp, Triticum aestivum
  Clone ID: LIB31-007-Q1-E1-F10
gacgcacgcctcaggtctgagtcgcagttctcaaccctgagaaagaggtcgctcactctgggcggggagacacagagcctgggatggggaccattgtcgtagggatcgctgagtcgcgtggggaggcggagacgtgccgtgggcaatcctttggtgccttcagtggcctcgagaatggttccctctttgccttcagaatggctgtactgctaggaagctggatgtaaaaggtagtgaggccgttagtactccatggctcagtcccatactgt

SEQ ID NO: 10349 - DNA, 437 bp, Triticum aestivum
  Clone ID: LIB31-007-Q1-E1-F3
tcccgggtcgtaagcgatgggctcagtggaggacttgacctcttttgatccaaagaggttgaagtttctctggaaagttttaatttatctcatattgatgtaaaggtcgggaaagataataagaattggtgttttactggtttttacggtgagcccagggtggccaataggcatcacagctggcagctcttacgtaccttattttttgtccaacacgaagcatgcatctgtatgggtgattttaatgagacgcttcagggggacgagcattttggagccaacgcaagaccggagaggcaaatgcgtgcttttcgggaagcagccgcggactgtgcactccttgatgtggggtggcggggtgtccctttcacatgggataacaagcagcaggggaacgcgaatgtgaaggctagactggactgtgctatggtcaactc

SEQ ID NO: 10350 - DNA, 401 bp, Triticum aestivum
  Clone ID: LIB31-007-Q1-E1-G11
ggaaccggtataggattccctggctcgacccactcctcaaaggtagcgccggtgtaacccacgctccatgctctccccaacgctcctcttgctgttggggtttctctgcgtatttgctatcacacgactaacctgccctcacgccagatggtctagcgttttccacagtggttccactgaaaccgtcctatgcgtccggggagcagatcgtcttctcctgccagcctgtctacgtgtcgcggggaaggatccggcagtttacatgccctctcaaaggactctggctcatcagcactctgaaatgcacgcccatattatgtcgttttggctgggatgttagtcccacctgacggtacgctatactgcgtttgcctatcgcaacaccatgcgcttttcttgcc

SEQ ID NO: 10351 - DNA, 461 bp, Triticum aestivum
  Clone ID: LIB31-007-Q1-E1-H1
cgctgcagtactggtcagcttccgggtcagccctatgggtttcctcaatacaaacacgtatgactgtgacatagatatgatgagtcaaccatatgacgtatcgggctatcagcatgctaatgaggatatggatgatatgcgccggtaggaaggtcgttggaaggattgcaaaaagtctctcttcatgaattcctcacagaacacgcctggagatgccacctcaacacaggctcaactagccgggggtcgtacagtgcttagcctgggaaccctggggtaagggttaaggaagggtctggaaggtgtgcccaagaaaaaggagatgaagagattgcggaagataactgcctccaaacaagccagagcacataacagccagaagattgattctgaagagcgtgcacccgtgaaaggtgcggtcatgttccatctcacgggcgagccgatgctaccgccgaaac

SEQ ID NO: 10352 - DNA, 218 bp, Triticum aestivum
  Clone ID: LIB31-007-Q1-E1-H12
cccaattcccaattctgagtcgtcttacaaccccctgtcctcgcttggggatcatttctacaacgtatccatttcccactgatcggctttactactctctcgctgtacgcatagcgcacaggtgtcctctcattcctgtactctcagatttgggcgttccactccaactgcgacgtctggttgtctgagaggcattgatgccccgagtttgccccggg

SEQ ID NO: 10353 - DNA, 354 bp, Triticum aestivum
  Clone ID: LIB31-007-Q1-E1-H4
tgcctaccggggcatccccaagcttagatgcttgagacttcttgaaatataatcttggggtgccttgttcatccccaagcttgaacttttgtgtctccttaattcctctcatatcatgggttctctttttagcaaaagcttcattcacaataaactcaacaagaactcgtcagataggttagtataaaccaatgcaaaaccttatcattttctactgtaacaaatcactatattattattccacattaaatactaaatgcctctgcatatttaatactcctatcatcaaatagaatcagtaaacaagcaaacatatgcaaacaatgcaaccataacagcaatctgccaaaacag

SEQ ID NO: 10354 - DNA, 309 bp, Triticum aestivum
  Clone ID: LIB31-007-Q1-E1-H5
acctacgcctcaacttgcattcggcttggcacccttcacaatatattattccagtggtcgctacacttcacctatagctactccatcctgtcgttatctcttccgacgggtgcttcctcggggggtctcggactctgagttctattcacatccgtgtttagatgtttctttgcgtgttcacttcatcccgccactttattttccctcatcaggagacaattgcactatcactccctagattccatccttcttacatctccacttccaatagtcttttgtcctacccaatacgttcagatacacttctgt

SEQ ID NO: 10355 - DNA, 426 bp, Triticum aestivum
  Clone ID: LIB31-008-Q1-E1-A10
gggtcaacgactacagaacggggacctctggatatgtatgacatgatgcgacgcacatgcaacaagaattgacatcctctaatgctaactgttgaccattcttctctgaagtatcagaggtgtggattggaatcagttttttttgctgcacccccattccgacgaggtcacgcacacataccaccgggaatcccacgaaccctatgttcgagcgcgagcgacggcaatagcatctgcaagtacttgaccaacacgctacccgggtgtggtatccactattgaggccaaacaacctagctcggtcatccttaagtgtgcttgtgtccagcacctgatgaagaacgggagaagattgctgactttgtgcctaatgatggttgcctgaacttcgtagatcaaattgacgacgtgttgattgctgaattt

SEQ ID NO: 10356 - DNA, 353 bp, Triticum aestivum
  Clone ID: LIB31-008-Q1-E1-A5
ctattcacatcaaacatcacggcaccaatatcagctacttatcatttttcctttcctgcagtgaatctactcatgtcatgtgtaacatcggtactatgggccaacatggctcataatggatgcacacatttgcagcccaatccgacacaactagaccatatccgagcttctaggcaaggaagcagctgctgtccacaacaagcatatttaacacctgatgagcaacactactcaagtccacattccgaatctctacactatcttcacttacatcgttaatgcaccccctaggagagctgtccaagcagtcgatctgcttcaagctcaagttgaaaccttgctgtgacgcctcc

SEQ ID NO: 10357 - DNA, 399 bp, Triticum aestivum
  Clone ID: LIB31-008-Q1-E1-A8
gggtccacttacaccagagcgatatccatcatctcatcgaaagacgggacaccttttcctctatcattgtcatgtcgccgctgccatatatcaccaccgcatcatcatcatcgctgctgccagggaccacgaccgcaccaacttcatcgctgctgcgatataccaccaccacatattcaccgccaatcccaatccatatacgccaccacatatccgccgccatcacaccaatccgagttcacctgcaacatatatccgccacctgtccgcgttccatcagattcatctcccccaccagtcctactccaagtccagtattttgttactctattttggatttccagatcactccatactccgagtcctgacagagaacgactccaaaacttctgtgttacc

SEQ ID NO: 10358 - DNA, 350 bp, Triticum aestivum
  Clone ID: LIB31-008-Q1-E1-A9
cccgggccaacaaatgctcaaaatcttcaacccatccttgtttgactttctattttcaataatcatgtagcaaaaagctagtatggctcatagtcatgaaattatttcccttgatttcttgcttagttacatgcacatattagataacaaaaatttgttaaatcgtccagagggaaaatggcgaagagaaacactgttggcctactacttgtccttgcaattatgttctcctacaatgtcttggagggcggtgcacaccagagccaagttgtattctctcgcaaagtgacgaatgcagagcacaaagcatcctttagcgggatgacttcatcccttggtgggcgtgtttc

SEQ ID NO: 10359 - DNA, 380 bp, Triticum aestivum
  Clone ID: LIB31-008-Q1-E1-B10
tcccaggccgtggagactttgagggcgcttcttgaggtggagactcaactgccgttgcaacagcagctgcttcatttcaatggcacggagatgaacaatgctgagaagctcagcgccatcggagtccatgatggtgatcctgtgatgatggttgcctccaataatacgacatctcatgatattatgaggttaaatcctgatggatcggcagtatatcctcaatctttccaacatcatattcttggcgattcagaacttattgcgcaactccttcaaaatgacccgtcattagctcaatgcatccttggtgatgacaccactgagttgcaacacagcttgcagtcacaccaccaataacgagtacaactgagtcgcataca

SEQ ID NO: 10360 - DNA, 291 bp, Triticum aestivum
  Clone ID: LIB31-008-Q1-E1-B11
gtaccgtaggatgcaagacaggctcggcggtgtctccgaggagagcaccaccggcgtcaagaggatctaccagatgcaggagtcgggtacccgcctcttcgtcgccatcaatgtcaacgagtccgtcaccaagagcaagtttgacaagctttaccgttgccgtcactcgctcactgatggtcttatgaaggccactgatgttatgatctccggcaatgttgccgtggtctgtggctatggtgatgttggcactggctgtgccgctgcacttaagcaggctggtgtcagtgt

SEQ ID NO: 10361 - DNA, 251 bp, Triticum aestivum
  Clone ID: LIB31-008-Q1-E1-B3
ttcccgggacgacacgttcctgctgagtgtcgatgagggcgctgcaagagccggtaattccaacatgatcagatgggtcactggggatacgggtggcctctttaccaccgtgaaggatggggagtttatcactgggaatgctcaccatctgatagaccttgctagtcaagatatcaagaacaatgtccaacacgttgccaacaggcgtggtaagcacactagcaatcgtgatatgcatagatctgcagcta

SEQ ID NO: 10362 - DNA, 375 bp, Triticum aestivum
  Clone ID: LIB31-008-Q1-E1-C10
ggccaaccctccatcgaatcctcaggctccgcggaggcatcatcgagccatccctgcaggctcttgccctcaagtacaaccaggagaagatgatctgccgcaaatgctacgcgcgcctgcacccaagggctgtcaactgccgcaagaagaagtgtggccacagcaaccagctgaagcccaagaagaagatcaagaactagagtgctactagtcagtttcatggaccggttgaacccattgctgtgttagcgtttatgctattgtcgtcacgatgtcgatgaaccttactttactttgctttcagccaccaatcgttgtggtgatgataactgacagtattggtatatggtagcaaacctataattttgccgtaaa

SEQ ID NO: 10363 - DNA, 433 bp, Triticum aestivum
  Clone ID: LIB31-008-Q1-E1-C11
tcccgggctcactctgagagagaatgggcctatcgtcaaataacggagatcgagaccacgaaacaccacctcttttacctgctcgcagaaatggacaagagatacccgggccgtagatacacgtcaaataacaaggagctgatccaccatcttttcaaacacgtcgaggctaaccccagcgatcccctctggcgccacactctcggaagagaaagactcaataattgtgtgatatatggaatgccaacgctgatggccacttggttgtatttggactgggagggttggaaaaatatgttcgctttcatacttggaattgggcactagttttctagctcaatctcttgagtctagatgatgctttcgacgggacgggagtaaagttacgtggccaacttcttgttttcaaaaggtttccaaataaaagttcaat

SEQ ID NO: 10364 - DNA, 433 bp, Triticum aestivum
  Clone ID: LIB31-008-Q1-E1-C12
gtcaagcattcccgggtcaacgcagcctaccatagggcccatcatagagagggcaaggtcgacgacgcacaggacgctgtcatgctgcaggtggcgtcagtgtggctgccatcgtgggtcatcacatgggagggcgatcgaagggagctgctcgctcatggaatctgggctggcctagatgtgacgaccagttggctcttgcggtcggctggcaggagtcctagggccttctcctgtgcttttgaattgctgtttatttgaatagacaactgcatgaaattagaatgacaaggtgctaagagaagatcatgatacatatatggatatccctgcattctatgaattatgaactgtttgatcaaattgttttgcacttttttacaggtataaacataactcaggtttgaacttagttcaaacttgattcattttt

SEQ ID NO: 10365 - DNA, 409 bp, Triticum aestivum
  Clone ID: LIB31-008-Q1-E1-C3
gggaccaccagtcaccctccaccaccctttgaagtgtgactgcccagcgcgctcatgctcgtttttgctcctcggcccgctctacttaatgcaagcccgaggaggaagagaggacgtatcagagaaatctgagaaacgccaagggtctgcctttcctctactgtgatagtataatatagatgaatgtgtagtgttctgtttttactatatatgcagtgcacgcgtgtatggttatgtatgtgtagagaaggtgttgaaagttgctgctgctgtgctgtgctgtgctgtgttagtatgtacttgctgtgttagtatgtacttaggtcgtcacccctgggctggcacgcagctcctcgtttgtgttttgtctactatgttgtggaggcctcgtccttccatcacgttcgtg

SEQ ID NO: 10366 - DNA, 415 bp, Triticum aestivum
  Clone ID: LIB31-008-Q1-E1-C4
gggaccacggcacagtcgaactctcaatgaaagcaccaatgtcggtgtcaaaaccgatggatctcgggtagggggtcccgaactgtgcgtctaggatcgatggtaacaggagacgggggacacgatgtttacccaggttcggtccctctctatggaggtaataccctacttcctgcttgattgatcttgatgaatatgagtattacaagagttgatctaccacgagattgtaatggctaaaccctagaagtcttgtctgtatgactatggtaatgaatatctgccttccggactaacccctccggtttatataggcaccgggggaatctagggtttacaaagagccggttacataagaaggaatcttcacagttgatcgccaagcttgccttccacgccaaggggagtccaatcc

SEQ ID NO: 10367 - DNA, 448 bp, Triticum aestivum
  Clone ID: LIB31-008-Q1-E1-C5
ccggtcctaccttcccgggtccacccagtgttaattaccttggttgaatctgatcctttccatggttatgaaactgaaactgttgtggcacatcttactaagttgaatgatatagccaccctttttacgcatgatgagaaaaatcgatactactttattctcaaaatatttcctttctgattaaaggatgatgctaaagcttggtacaatactcttactcctggttgtgtgcgtagtccccatgatatgatttattacttctctggaaaatattttcctgctcataagaaacaagctaccttacactaactatttaactttgtgcaaactaaagaagagattctcccacaagtttggggcaggatttgccagctacttaatgctttgcctcatcatcctcttaagaaaaatgaaacacttgatatcttctataatggactagctgatg

SEQ ID NO: 10368 - DNA, 423 bp, Triticum aestivum
  Clone ID: LIB31-008-Q1-E1-C6
cggtccgacattcccggggccacagcgggtggtaaatctggtgatagctcccctaataagctcgaatctttccctgatctggaggatctccgtcgccttgttccatttgttcgtcgctgtcgtggagatggggacagaaagtggaagaggtggagcgcaagtttgtttcgattaggtttgtgcatattctcatcggtgcttggagtggagctacggggcccaatggagctgccggtctccgacgcctccccggtgacctttctggccgaagggcgggcttgtgaagccaagctggcttcgtttcttcctcccggcttgatgccaattgagaggcaactgtgcaaattcaaaatggagtccccttcttccatctttgtccggagatagagtattggcggtccggtgatctcaaatggtcacgtc

SEQ ID NO: 10369 - DNA, 417 bp, Triticum aestivum
  Clone ID: LIB31-008-Q1-E1-C7
ccggtccgagcctcgcggggtcacaacgtgccggaaatcactggggctgtctctgatctcatcgccctcccggagaccgatacagagatcaatgatctgagcggcaaggtggtgaaagatgccgcatcgacgccgaagttcacacagcgggagatctcgttcctgctgaggctgatgccagagcttgtgcaatagcacagattgcacaccattaactcatggctttggatgtaaccgattgattggcatgcaggacaggaggagccccttgtggaggaaagcacaggtttacatactgggttggtgtgatgtccttcggtgagccctggtactgggagagttggggattgatatgatatgtacatgttgtagtgtgggtggcgaaatttttggatatacatgttggagtgaatgtca

SEQ ID NO: 10370 - DNA, 401 bp, Triticum aestivum
  unsure at all n locations
  Clone ID: LIB31-008-Q1-E1-D11
accctngagacaagccacacgtatatcgtctcaggacacgaccagatgagcagtccgtacaactaaaaccaggcctcgagtttccccgaggtggcactgcaaggggctctagttcggaccaacacttagagtagcactggcgcgcggggggggggggttaaaataaagatgaccctcgggttaattactcccatgggaaaagtaatgggttgttaggcaaatgtagaacaaaggttgggccttgctggaggagtttctttcaacgcgaattgtcaaggggttcccatataccaaaccgcgttagggacgcaaaatccgggaacataataccgatatgacggaaactagggcggcaagagtggaacaaaacaccaggcataaggccgagccttccacccttt

SEQ ID NO: 10371 - DNA, 365 bp, Triticum aestivum
  Clone ID: LIB31-008-Q1-E1-D12
cgggtcaacgaccacagaacggggtaacagtgactcttgcatgacttcattgacagacatgcctatcagctcttattgtggttcataagtgatgaagcaacacgaatcatctggtgctcctcctttgctagtcaaggatgagttggctgtatcaaatttggatatacaagcaagtttcctagataagaccgatgatggttgtctttcccaaaacaatggaatgcacaaatctcagttacgcctttggatcgagagcggacatagcatgaaatgtgaaagcgtatcatcctcaaacatcacaggtcatgatacaccaagcaaggcaaatcgaaagagatcacgaccagaagagagttcgaagcccc

SEQ ID NO: 10372 - DNA, 452 bp, Triticum aestivum
  Clone ID: LIB31-008-Q1-E1-D2
acggggcaaatccgggacacactctggacaattccccatcccgatccgatctttactgcaaaccctacccttcctgagccaccatgtccgcctcatcgtcctcctctctcccagttccgccgatttccctcttgatctcattcggtgtcccttctgtggcgtggatctggaaaccaatgtggcaaggaccgggagcagggcgggccagaggttctacaagtgtgtccgctatgatgtaagttcctctgttttctaccaaatctcgattagttcctttcccgttcttggttcagttctcacacctgcatctcgcatgtttcttgctaattttctcgcaggctcgcgagtgtaggttcttcgagttccagaaggcatacgtcaggaggatgaccacctaccagatcgcccgtgctcaacagcaggcgggggtgctccacctccagatgcacgca

SEQ ID NO: 10373 - DNA, 441 bp, Triticum aestivum
  Clone ID: LIB31-008-Q1-E1-D4
gggacgacaaacatgacagaccagatttgaacaaaattcaaaaaactgaaataattatttactaacactaatattcttgaataattatttagtaacactaatattcttgaataattatttagtaacactaatacttcttgaataagtagtttgaccatagtttgagcagatttaacaaaaagtaaaaaaaaataaaaaaaactaaaatttaagcataactttttttctttttaaaatttgaggattttaaaaatttgcaaacaaggaatgtcatgggaatggagatctgccgtgccggcattagactagacgattagttgatgtatgttcaaaattttacctccagagtcggacgagcttcgcttttagttgaagtatgtcggaaatataatgaatttcgtcctgtttatatgaaatccgttgtgtttgcattaattccgt

SEQ ID NO: 10374 - DNA, 407 bp, Triticum aestivum
  Clone ID: LIB31-008-Q1-E1-D6
tccattatccaaacactgttgtatgggtaatgtcatgaaatttctctccccttacctaaagggtttttgtacattatatcctgtcatgggtatcctgctctgcttgtccttgggaaggatatacccctaaaatatgtgtttaaacacattttccctttcattgttctgtttaatctgataatcactttttcctttcccttgacttgtttaacctttctcatgggttatatgatctaagcagtaataattcggtgcttatgtaaacaccctggtgtacaaccttgtcagtaagaccgtgttactattgttgatgacatttcggtaaccaccgatggacgagaactttgcctattggtccacctcgtttcaacgagcaggaaaatggttcccttcgtcactcgcccttg

SEQ ID NO: 10375 - DNA, 394 bp, Triticum aestivum
  Clone ID: LIB31-008-Q1-E1-D7
gggccgtcaaaatggtgaatgttccgaagaccaagaagacctactgcaaaaacaaggagtgcaagaagcacacacttcataaggtcactcagtacaagaagggtaaggacagtctgtctgcccagggaaagcgtcgttatgacaggaagcagtcgggatatggtggtcagaccaagcctgttttccacaagaaggcaaaaaccacaaagaagattgtgctgaagctgcaatgccagagctgcaagcactactcccagcgtgccatcaagaggtgcaagcattttgagatcggtggagacaagaagggcaaggggacatctcttttctagactgctttcacctatctggagtggtggtggtcaagaagtattactacttgtgttaagagtttggt

SEQ ID NO: 10376 - DNA, 406 bp, Triticum aestivum
  Clone ID: LIB31-008-Q1-E1-D9
gggcctaccccgggggaccgagtccatgatattttccatacagagtgatgtctacagttttggtgtgttccttgtggagttgatcagtggaaggacggctgcgtctgatcaaggcattattgaatgggttcaaaactttcaagaatcaaatgatatctctacaatagcagataggagaatgaccagtggctttaccccacaaggcatgaaggaattgttgcgcttggcattgcggtgcgtgaacccgacaagcgagaatcgtccgtcgatgagcctggtggaagctgagatacaccggatacgcaagcaggagatcaggaggacgacaggcatgccactgggcgacacaactgtgaccctatgcagccagctcttcacatcagcaagatggaaaaacatgggaaat

SEQ ID NO: 10377 - DNA, 360 bp, Triticum aestivum
  Clone ID: LIB31-008-Q1-E1-E10
atacgcactatcattgctattggacgacaagtattcccagcgtcctcttttgccgcaacaccttacaaaaaatgccctgaatatccatataccaatcatagcacgttctggtatacaacctcttcagaaactcatcttggcatagatttatcaatcataacgttggaacaggggagaacatcccgtgggtccaacaacagattgatatacgtttcacacctgttgacaacatgataaaaggctgtgcagagaagtttgctatggcgagatgaagtccactctggcagacgtattccttgcaccccagatttttgctgcagtgaatcgttttcagatcgaaatctcaaactatcctatgct

SEQ ID NO: 10378 - DNA, 402 bp, Triticum aestivum
  unsure at all n locations
  Clone ID: LIB31-008-Q1-E1-E11
ggagcatttttacatgtaaagccatcaatggtggtatttattagcaagacacaccatctctagaatagcgtcatcctgatgatcatatgcgcgaagcgatttcctctcggcgactcggcttctcgatgtgaccacaacgggctagtgacaggggtgtctccgacgaggacacacaagataccaagcattgatcacggggtagcctggcatgtgagcgcagaggagaccatttcaaattgctttaccatctatggagccaaattgcagtctggtgatgcggcaatgggcagactaagttttaatactaaagtaggatgtcaataaaagcacatcactaaatatataagatagaataatcagttgtaatttctaacatgtanttttcaaaaatacatgaatttg

SEQ ID NO: 10379 - DNA, 457 bp, Triticum aestivum
  Clone ID: LIB31-008-Q1-E1-E4
ccgggacgactacatgacacttaaccatttatatgggcctaggaggaacgcattgggaagtaatacagtagatgatgggttgcctacaatgacaaacgcctaaatccgatgttatgagttgcttcgtttggggctgatttggatggacatgtttcatgcgaaggttaagtttaccatcatacttttgttgtaattgcggatgcttgcaatagaggttagccataagtgcgatgcatgtccaattaacgacatcacgcaggcaccggtccacccacatgaccatcattaccaatgtaacgaatgcgaatcacatgaatgtgatgaaaactagcatgacgatattctcatgtgtccacgggagcacttttcactatataagagtttgtcgaagcttgtccttttctacagaatggattgggacagcttgctgcactttaattacttttgttacatgttc

SEQ ID NO: 10380 - DNA, 256 bp, Triticum aestivum
  Clone ID: LIB31-008-Q1-E1-E8
gccaagatcgtgggcaagactggcgacgggcaagtcgcgagttcttaccaccaatgcatcattctgggagcagcacgaagacggtaacttccacgtgccggactttcggggttaagtcctccccacaactgggccgttcacagtatgaattcagaatgttctactggtcctcgtttaacattccgtcgtcttctgcattgacacacattgtacgcctcatcctcctaacccctaaacattccatggtcacatattt

SEQ ID NO: 10381 - DNA, 402 bp, Triticum aestivum
  Clone ID: LIB31-008-Q1-E1-E9
attctcgggcacaagtgattcgtaaaaacaatgagaacttggcagagagacgatatattaagcgtatcatggaaagtgtgttccaacacatgttaccagattgttctctgagattatatgggtcatcctggatcaaattgggtttcaacgtttcggatacatacattgacattcaatttccaaccattatgtctcacccagatgttctcttacttgtccaagaatgtttaaacaacaatgactcatttattgatgttgatgcaaatttccatgctcgggtgccaatggtggtgtgcagagaaaagcagaatggtcttctttgtaaaatgattgcacgaaatgaaaatgcatgtctgacaacaaatcatttaactgcccttggaaaactacaatcaaatctgg

SEQ ID NO: 10382 - DNA, 301 bp, Triticum aestivum
  Clone ID: LIB31-008-Q1-E1-F10
cgtaagtgaaatcgagtctgttcttgagacatatagcccacatgacgtgacacacgtttcaagaaggagatgtcactcatatacatccgaatcggaacctttacacatcctgtttaggattttgctttgttgccattagccgctacaacgacgtgtctaaatcctgatcggaaagtcaattcttttaaattttctagtgaaggcaagaagttgtcacgccgcagcggtaacagcaacatcgcccctgtcatctacaaccaccgcctagacaccacagtgacgaatccgtatccaggattaa

SEQ ID NO: 10383 - DNA, 467 bp, Triticum aestivum
  unsure at all n locations
  Clone ID: LIB31-008-Q1-E1-F3
acgcctgccgtcaccggtgccgagattcncgggaccaccctcacgtctccaatgcacaacattccaatcacttctctttttgaaaaagtttttaggcataagaagcaagtattttttttggtattttcattttgtaaattttttgtttgtttcacccacaactaaacaaaaatagaagggaagacaaaaactacttagtgaagaaagcaaacaagcatacacgaaaatatcaacctcacgctattgctccccggcaccggtgtcagaaaagagcttgataatcccgaagtgcaaggaatcatcatagcaatttccaaaggtggaagtgataagtatggagtgtcgaacccacaaagagctaaaggtaagatcaatattctcccaagtcctatctgccaccgatacaactgtacgtacaccgaacgtttgctttcatctagaaacgagaaatacaactacattgtggg

SEQ ID NO: 10384 - DNA, 474 bp, Triticum aestivum
  unsure at all n locations
  Clone ID: LIB31-008-Q1-E1-F4
acgcctgccgtgaccggggccgaaattcncgggaccacaataagaccaaccaagtgtgtgcatgttgacagagataatctatacaaagaagttcaaatattattgccccgcaggtttttcatgtcttcacaagatgtaccactattttcttcactctcaaaaattgtgagttttcaacactacaacaattcaataccccaaagaaagttatgggaaaaaaatatagaaagtctagagaggttggggacaaaaggatttctgtaactcaggttctcacatcaatcgagaataaagcccagaagttcaatttgaaaaagcggagcagtttgatatctatttgaaaaatcatatttttctagttactaaagaataaaatcaataagttcaatttcaaataacaaagaagttcgatgtttctaaaaaacctactatttttcaaatttataaaaatacacaatgaagttcaaataaaaa

SEQ ID NO: 10385 - DNA, 453 bp, Triticum aestivum
  Clone ID: LIB31-008-Q1-E1-F5
cggtccgaccttcccgggtccacccagtccacatcatcggcaagctgcgcagcaagctcttccgcacggcgcagatcctctccgtcggcccggccaaggaggacaagaaagacgacgccaagaaggacgacggcaagaaggagccgacccctgtgtacccgccgtggtacccgccgccgccgccgtaccactaccactcgcacccctactaccacggccacagcgccgaggaggatcccagctcctgcgtcatctgctgaccgagtgcacgttcagtagctcgccgtcctgcctgccgatcgatcggcttacctgcaccggtgatggacggcgttcgttatatacatgacatgaccgtgtaggcgtgtacgttgcgccggtgatccggcagctgtgcatctggttatgcttagtttgtaacgtgtacatacagaattacagtatattgttcac

SEQ ID NO: 10386 - DNA, 459 bp, Triticum aestivum
  Clone ID: LIB31-008-Q1-E1-F6
accggtcctaccatccggggtcactgacaccaaagaaatatccatcatctcatcaaaagacgggacacctttgcctctgtcaagtggtatcagttttcaggttgctcggtgagattttacagtttttcgtagtttagatcgagtctgttcttcatacctataatccacgaaaaagccaaaaaaattagggttagttcatcccatccgaaccaatctgagccttgcataatcttttctgtatttgctttgttgaatttgcggttgcatcgtcgtgtccagttgctggtcttagcgtctagtcttttagagtttcgagttctgttcacaggttgtcacgtcgccgctggcatatatcaccaccgcatcatcatcgtcgctgttgccatataccaccaccacatattcaccgccaatccgaatccatatatgccaccatatatccgccgccatcaggccaat

SEQ ID NO: 10387 - DNA, 437 bp, Triticum aestivum
  Clone ID: LIB31-008-Q1-E1-F7
cggtccgacattcccggggtcacctgcccaggtggatgcagtccgtcgtgcgctctgagtggactgcggaggtgtttgacatggagctcctgaggaaccagagctccgaagaacagatgattcagcttctacaactcgctatagactgcgttgcccaggtcccagacgcccgtccgacgatgtcccatgtcgttgtgcggatcgaggagatcaagatgtcaggtggaagcaccgaagaaactaatcaacaacagagcaccctgatctctaatggcatgagagaaaggagccggctgcctgttgctgtagccccattcattccgttcatagacttgacgaatgctatcttcttcgacggcggagccggctgttttttcacctcttccttttaacgaacatcggattcgttgtcgtcgtcgtcttggtgttgttgactg

SEQ ID NO: 10388 - DNA, 419 bp, Triticum aestivum
  Clone ID: LIB31-008-Q1-E1-G1
ttccgggtccactacgccgccgaaaacaggtaccaactcgaggagatcgccaagctcacctccagctagaagaagatgcaagaggagtatgcctgctcccctcgaggagattcccaagctcaccgctgcctgctgggagaagatgctccccttgaggagatagatatccaggctcatcgcactagacggagccatgttttggccccaagtttcctgaagtgtagtgctgcttcagccgtgtctttctgccgtgtcgctcctcaaatgtagtggtaacttaaaacgtgttatatatgtagatgtttgattcggaggacatcggggtattcttctgttctactatctgtttgatctgcaaccttctgcatatgacaaggatgtatgcagatccactgctagctgatgttaaacatgttctg

SEQ ID NO: 10389 - DNA, 355 bp, Triticum aestivum
  Clone ID: LIB31-008-Q1-E1-G10
cagacacgactaagctgcagaccgacgccctcaaggaggccatcacccaggtggtggcagacgccaaggagaagaacaggaagttcaccgagactgttgagctccagatcggcctcaagaactatgatccgcaaaaggacaagcgtttcagcggctctgtcaagctgccccatgtccctcgccccaagatgagggtctgcatgctcggtgacgcccagcatgtgggagaggctgaaaagattggtcttgaatccatggatgttgaagctcttaagaagatgaacaagaacaagaagcatgtcaagaggcttgccaagaactatcatgctttcttggcctcagaggctatcatcaa

SEQ ID NO: 10390 - DNA, 245 bp, Triticum aestivum
  Clone ID: LIB31-008-Q1-E1-G11
ttcagggctgtcgttgaactcgatatcggtcgcgacaactatgatccgcaaaaggacaaccgtatcaccggcgctgtcaacctgatccatgtcccacgcagcaggatcacggtctgcatgcacggtgacgcccagcatgtgagagaggctgaaaagacgggtctatgatgccatgcatgttgaagcgcctatgacgatgacgaactccgagaagcatgtcaagaggcttgccaggacgtaccatg

SEQ ID NO: 10391 - DNA, 449 bp, Triticum aestivum
  Clone ID: LIB31-008-Q1-E1-G2
ggtgcgaaattcccgggaccaccatggcgtcttcaaactccgggggcatccccatcaaggccgaacaggattcggatggctcggcccagagcacagctgacatgactgcttttgtgcaaaatcttctagttcagatgcaaaccaggttccaaaccatgtcagagaacatcatcacgaagatagatgaaatgggtgcaagaattgatgaattggagctgagcatcaatgacctcaaggctgaaatgggcagcgatggtatgacccctactaaagtgaaggacgaagaatcaaagccagcagacagctcttcctgagtgaagcagaagtagcagaagcaaggcgtattagtcttggttccatgtcgatatcatcagccattcatcactaacttactgcatgttatgagatgttatttgcactgttatatgcatatgagatatacagtacct

SEQ ID NO: 10392 - DNA, 454 bp, Triticum aestivum
  Clone ID: LIB31-008-Q1-E1-G3
gggaccacagggactgctataaagactgttcttgcgaccggttccagagcaaatcatcgatggtgcttgagctttggcgctcccggcggacagccggcttgcagcgccgccgcgccaccgaatcctctggccgaagggcggccaaacctcttcctcctagccttgaagctatatgggaggcagtgctactctagatcgatgttcatggcttgctgcggtgaagaactcgtcggaccaagtggtgatgtccccggagccggcgagtttggagtcgatcgggagtggcttggacctgattgcgttcctcttcagatctttggggtcctttctgcatatttcagggactgctttgtaattttcagtttgttgtgtgtcctgttgttctggcttgtactacggtattgtaatatcaaataaagtctggggtccttttggaccctgcccttgttcaaaa

SEQ ID NO: 10393 - DNA, 407 bp, Triticum aestivum
  Clone ID: LIB31-008-Q1-E1-G4
agaacaaagtcatagccatgccagctctggagcatctaggtcgggcgtgagttgtgtgttggggttggacatgcaattgggctgagcaaattgggtgtcggtgttcgaggtgtattcggttgggtgcgtatgtcaaagatggacatacacctaggtcaaacgggttgtgtgttagagttggacaaacaactatatgcatataccgggtcgagcacgagttgcgtgtcaaaagtggacatgcaactagatcggacatgagttgcgtgctaatattgaacgcgcaactaagtaagggtccggggaatttgatgatagacatgtaactgacaccaccacaaaataaagaatttaaaaaatcatgaatgttttgaacacagcccagcttcttcaattctgcccgtacaaaa

SEQ ID NO: 10394 - DNA, 472 bp, Triticum aestivum
  Clone ID: LIB31-008-Q1-E1-G5
acgcctgcctagtacggtccgacattcccggggccacttccaccaaagcaaaatacatcatctcatcgaaagacgggacacctttgcctctatcaagtggtatcagttttcaggttgcttggtgagattttacagttttttgtagtttagatcgagtctgttcttcatacctacagtccacgaaaaagccacaaaaaaaattagggttagttcatcatatccgaaccaatctgagcctttgcatagtctttttagggttttgctttgttgaatttgcggttgcatcgtcgtgtctagttgctggtcttagagtctagtcttttagagtttcgagttctggtcataagttgtcacgccgccgccgcaccatcatcatcgcccctgccatctaccaccaccgctccaaatccgtatccatataccaccaccaatctgtgtccatataccaccaccaatctgtgtccatatacca

SEQ ID NO: 10395 - DNA, 346 bp, Triticum aestivum
  Clone ID: LIB31-008-Q1-E1-G9
gacacgatagtgggcagcactggggaccggcatgtctcgagttcttacctcgaacgaatcattctggaacacgaagataatgataggttcctcgtgccttacgttccccactaagtcctccactcaatcggggcgtagcatatgaactcgtacatttcgatcaattttcttttaaaattcagtgtcttcagcagtgacataagttgcatgcgcaacatcataagcgtcatatatttcatggtcacgtatttcgacacggagcatcagtcgatcgtagactacacatttgtcaacaatgttcatgatgatgttctccccggatacgctaaatgtagatggaccttca

SEQ ID NO: 10396 - DNA, 355 bp, Triticum aestivum
  Clone ID: LIB31-008-Q1-E1-H10
tacttgctctccacatgccaaatgacatgcattttccatctgggaggaacttacatgtctccccactccaacctgatttttcggggggtgtgtcgtcacgctcacctattggtcaaccataaccatcccaccctgcataaatgctgttaaatggttgtgcgtagtatatagttgcgccaccaaaactctcagctcaagttctcgtctaagccggatgtcttcctcgacttcctctgtctctctggcgcatatgtcgtcgtcctcgtcgccaacgactcgcatttcccttgtgccggtgtggaaagaactctggtcctgtcgtcgtcggtctcactggccttggtctatccccttc

SEQ ID NO: 10397 - DNA, 432 bp, Triticum aestivum
  Clone ID: LIB31-008-Q1-E1-H11
gggccaacaaacaagggcatacataagcaatcactcaatcgaaacacaagaaaactcgagaaaagatccaaatcgtacacgaaacaagcaacgacttaaactaacaagagtcaaaacctaacaacattattaacatgtgaattagatcttaacagaaagtacaagtgatccgctacgattcgcaaagagattcaactcaaacggagcaagaaactcaaaatacgaacgaaataagatcgtttactaatttggactgatgtcaaattttacattaccaaaatcatgttcatgttgattaaatgaaaagagggcttcaagacgaaaattttggcgttggtttcaactaatttggataaacgagtaaaaagttatactagtttgaaaatcaggggctgaatcgcgataaaaataatcgcagataagtccctaacg

SEQ ID NO: 10398 - DNA, 247 bp, Triticum aestivum
  Clone ID: LIB31-008-Q1-E1-H12
acgcgtcaagaggcggttctggttccactgcccacaccccgctctcgcaggcagacatgaggacagagagaatgtcccccctcctggctctggggatcctggtggctgggctctgcgccagggtccactgtctcccagagaatgtgtctccagaagaacagcacagagtgacatctgtggatgggcactcattaccctccaccaacactgacttctccttcagcctctagaagcaatttgctttttt

SEQ ID NO: 10399 - DNA, 397 bp, Triticum aestivum
  Clone ID: LIB31-008-Q1-E1-H2
caaccaagcccctcacatgacaaggccgagcattcaaaactctgagccggatgcatgtgtgcacctgtctcatttggccgaactagcctggtccaacacaaacggtgcggatggatgacccgagatcatgcggcacgtgccgcgcgtgagacggtgcatgtaggggcgatgaaaagcaccacataaagctgtgccgagcgcgcccgcggcccatgtatcatggagcttgaggaaaatcggtcgggtgtgaggcagcctcaatgattggacgacatggagcgtgcccgggaggcatcggcgggaggcgcgtgtgaaacggacaacatggattcactctcacgtctcacgtggcgatgccccaaaaggtgggtacttcaacatcctttacataagtaac

SEQ ID NO: 10400 - DNA, 426 bp, Triticum aestivum
  Clone ID: LIB31-008-Q1-E1-H3
ttccgggaccacttccacgacagcaaaatccaccaactcatcgaaagacgggacacctttgcctctatcaagtggtatcagatttccaggttgctcggtgagattttgtagttttttgtagtttagatcgagtctgttcttcatacctacagtccacgaaaaagccacaaaaaaaattagggttagttcatcatatctgaaccaatctgagcctttgcataatctttttacggttttgctttgttgaatttgcggttgcatcgtcgtgtctagttgctggtcttagagtctagtcttttagagtttcgagttctggtcataagttgtcacgccgccgccgcaccatcatcatcgcccctgccatctaccaccaccgcttaaccggcaccgctccgaatccgtatccatataccaacaacgatccat

SEQ ID NO: 10401 - DNA, 403 bp, Triticum aestivum
  Clone ID: LIB31-008-Q1-E1-H4
gatggggcaggcatgaagagaagaacgcgtgtaggggaaggtgcactaagggaagttgcggcttatattctcgaccatgcagttggtgatcgtgaatcgggccacggtgttgggttttctggtgtgcctcccacagcattagtccgaagcttacataggggaaagagcttcaagtttggatctctgcagatgtttatggagaacgatggaagttgcgaggatatgggtccccgtgcttttccagtgaaggaggtacacaaaatagcagtgttagatattaggttagcgaatgctgatcgtcatgcagggaacattctagtgtccaaggaagaaggtgccacctgcaagctgattccaattgatcatggctactgcctgccagagaagtttgaggattgcacct

SEQ ID NO: 10402 - DNA, 460 bp, Triticum aestivum
  Clone ID: LIB31-008-Q1-E1-H5
ccggtccgaccttcccgggtccacaagagaacttcaaaagcggcgtaatgaggtggcaattaacgggtggctgcaccagtatttcgagtcagttgtttccatgtacgaggacaggtttgagttatatgttctatgcagaagatcatgcaagaacacagcagataatcggcctgataaaactaattggttgactaatgcatttcgaaagccttcgacatctactcgcctggattatgtttgcataagcccattttctcttccagttagaaggacaaaggagctaagagctctgactgggtggaggtattactacagccttttcttggagttgtcggatattgcaatgccttttgcatgggcagtcgtggctagagtcagcgctgcggtgtcctacttctgggtgtccaatgataggagaatcttggggctcaatttttctggtataaggcaatcgctgggc

SEQ ID NO: 10403 - DNA, 359 bp, Triticum aestivum
  Clone ID: LIB31-008-Q1-E1-H7
ggtccatgacttcccggggccactaaatgtgtgtaaaatatcatcacgaaataatttttgatgtgagctgtgcagaaagaagtcatgtcgttttatactgaatagtacatatgcttgagatatgtgatttcgtcaggtttgcgtaggtcgcataaaacagtagttcacgaggaaaggttgtaggcaagtaagagaccatcgatatgtatgtgtggagtttttttttacctaaagattaagtttttcagaatttcagattgaggcctccatggaacttgcgctctaatagggattgcctatgcatgttgttactttaattttagaccttttccctaacaagtccaaatgtcgcaatcttt

SEQ ID NO: 10404 - DNA, 370 bp, Triticum aestivum
  Clone ID: LIB31-009-Q1-E1-B11
actcgcgggtcgacgtcaaacactacgatgacgtcctatcacatcgaaagacgggacacctttgcctctatcaagtggtatcagattcccaggttgctcagtgagattttacagtttttcgtagtttagatcgagtctgttcttcatacctacagtccatgaaaaagccacaaaaaaaattagggttagtttatcatatccgaaccaatctgagcctttgcataatctttttagggttttgctttgttgaatttgcggttgcatcgtcgtgtctagttgctggtcttagagtctagtcttttagagtttcgagttcgggtcataagttgtcacgctgccgccgcaccatcatcaacgcccctggcatcta

SEQ ID NO: 10405 - DNA, 386 bp, Triticum aestivum
  Clone ID: LIB31-009-Q1-E1-B9
catatatcacaaagataacactgtgtaaaaattgttcagcagatattatgaaatgttcaatgtatcacgttttaaaagtttgttagagtttcaaatttgttcaagaaaacatttttcattttttaaagaagattaaaaaactggatctgccgctattgaaagtactttaatttagcgttgtaattgaagacaaacgtagtcgctacctgcaaggctgcaacggctggcaacgattctatccagcgtatggtcacgggtttgaatccatccgtcgctgcaatttttcgtgacattttctattatgttcgcttgtcgcctggtaaagggccggcccgtttgcgcgaatcctgcagcgaaaggtgttcattttgacgctcacgagtgtc

SEQ ID NO: 10406 - DNA, 409 bp, Triticum aestivum
  Clone ID: LIB31-009-Q1-E1-C2
cgggtcgaccccttctacaagcgtgccacgatctagggcagcgctggggaccggcaagtcgcgagttcttacctcgaaggcgtcattctggcaaaccaagataaggataacttcctcatgccttactttcccgagtaagtcctcccctcaaccggcccgtaacatatgaattcttacttttcgatcgtttttcttttaacattccgtgttttctgcagtgacacacgttgcacgctcatcctcctaagccccaaatattccatggccacgtatttcgacccggaccgtcactcgaacgtagactacacaaatgtcaagaaggttcttgatgatgttctccccggctacgcccaatctggaggcatcttcaccaggcctattcgtaagtacggcaagcacgtgttctccc

SEQ ID NO: 10407 - DNA, 288 bp, Triticum aestivum
  Clone ID: LIB31-009-Q1-E1-C5
gggtcgacgaaattgtctatctgggctctgtatatctacacaatatgttcccctttgagaggctcatgggagtcctaaagaaatatgttcgtaaccgtgctaggccagacggaagcatctccatgggccatcaagcagaggatgtcattaggttttgtgttgacgtcagtcttgaccttaagaagattggtctccctcagtcgtggtatgaggggaaacgtactagaaaaagcacgctatgaggggactcaacaatatgtggggacgtgcattcctggtctcaagcac

SEQ ID NO: 10408 - DNA, 222 bp, Triticum aestivum
  Clone ID: LIB31-009-Q1-E1-C6
ctcgtgggtcgacactacgctctaaactgaatcgtcctatgccagtcttctccgcatagccggccgctgagtccgacagcttatacctccctgccctccaatcagtccatggcgagcgtccccgcaaggtgaggaaggagggatcagaagccataatctctcacctcgagcccctgtacatagcggattcaggaaagaccgaactgcccgctgcatccaatc

SEQ ID NO: 10409 - DNA, 439 bp, Triticum aestivum
  unsure at all n locations
  Clone ID: LIB31-009-Q1-E1-C9
ctcgcgggtcgacgaaaatcacaaaagggattacatgctaggaaaatgtatgtagtctcttcgtaaacaaatagaagagtatttagatcactggtgggagtaattaataattcgctaagcatcgacagcacagtgcacacggaagaggagagtaataatctatttttttgaaaaggatgttgaaaccccgggctctgcatcaatagatgtacaccgccatcattattaaattattcaacaatggtctgagaagaacatacatcaaatgactcgaaggcaccactcacgcctacaaactcgttaataaggatccatcgctcnccaccgttcagaatcggtatcaccgtctattcgtccgcaaacataccacacaggggcggagccagaatttgaacatgagtggggtgaaaagccaactttcacaaaagtcacgaaacat

SEQ ID NO: 10410 - DNA, 393 bp, Triticum aestivum
  Clone ID: LIB31-009-Q1-E1-D4
gggtcgacaacactcgctatattcattcgtatgtattctaccgtgtggtgcatctgaaagtaagttccgtggactacgacaggcgaggcgaggcgaaacgacgacaggccatgctaaacgggggacaaacttggtctctgtgtgcttacgatggagtcacgcatttgctttgagaactgctagcgtgtttaacctgacagcgcctgtaattgtaggccctttcagcatacttcacagcttgttgtcttatgaagtgctgcacggcagcaggctggtttatgcctcctcggtcattaatagcatttgtaacttgttagagtgcacattaatctcatgatgacatatacataatacttatgctgactgttattgtaacgacctttatgcctttgc

SEQ ID NO: 10411 - DNA, 394 bp, Triticum aestivum
  Clone ID: LIB31-009-Q1-E1-E12
ctcgcgggtcgacatcatccacaattcagaatcgtatgagaaccaagcccaaaagcagaggcgccgtacataccgtgctcatggacgcatcaatccttacatgtccaacccctgccacattgagctgatcttgtcagagaaggaagagccagtgaagaaggaggctgacaacgtcgtcgcaccaaggaaagctatctaagctaacggagtggctgcattcgtccaagaatcttagttgtagttcttctcaagtacctttgttggcagtgtttgttgcctccttgatgtttttgttaccaacatggagtaaggatttgttaatgttgatgttatccttgtgattgcgactggtccctatatgctagaacaggtgcgagtagttgagcattagccc

SEQ ID NO: 10412 - DNA, 371 bp, Triticum aestivum
  Clone ID: LIB31-009-Q1-E1-F1
gggtcgacacgtggctgggcccaacggcggcccatatatgttaataaggccggcccaatcaaaggcccgtagaacttaatcacgtactagtgggctagcccaataacggcctgcttaataaaagcccatttacggcccgaaaccagatctggaccgttaaatgttcgcccaatatttgggcccatttacgaaccgaaaccagatctagcccgttaattgttcgcccaatatttgggcccatttgcgggccgaagccaaatctggcccgttaattgttcactgaataatccggcccaactacagcccaaccccgaccaatgtgaggaaaggatgatggaaactatgattccctcacaagttgggatgagact

SEQ ID NO: 10413 - DNA, 158 bp, Triticum aestivum
  Clone ID: LIB31-009-Q1-E1-F3
cgggtcgacaccttcatcaaaaacgtttctcactacatctccttcgactcgggcgccatcgtgcacgactactactcccacgtcgttccagccaccatcaacttcagctcccatggagactgtcatctgggcacgggacatcgagcgcaatcggatac

SEQ ID NO: 10414 - DNA, 399 bp, Triticum aestivum
  Clone ID: LIB31-009-Q1-E1-F6
taattaaatttattcctttgaagtagggaaaaattggctttacacaaaaactataaccatagagctttccaccagccaaatatgcatatagtatagctgttgcattccattactctctatgtgttaccttgccagcatattccatgtgctgacccgttttcaggctgcaacgttaatgttgcagacttttcagacgatgattaaggagtttttaggtcgtggttctatactcagtgatgccgttggagttgatggactcacttatcttccaagccttccgctgttatcgttattagatgggcttaagccatatttattgtaatcagttctctcttgagacactccgatggtataagtgtgtgattgctactctgctataaatccttagagtactgtgtg

SEQ ID NO: 10415 - DNA, 437 bp, Triticum aestivum
  Clone ID: LIB31-009-Q1-E1-G1
gggtcgacttgtgatgttacagttacaatgcaagcgcggagggaagcacctcctgatctgcagtgtaaggacaagttcctagttcaaagtgttgcagctgagaatggtgcagcaactcaagatattagtgcagcaatgttcaacaaggagccagggaaggttgttgatgaatgcaagctgcgtgtaatttatgtgccaacatcttcacctagcctgttctctgaagattcagaacaagggagttctgctcgttcattggaaaacgggactcctaattctacattgccacaatctgtatttagatcatctgggtaagcatcaaaggagaagtcctgggaggcaacatccatgatttccaagctagctgaggagaaaatgtctgctgttcagcagaaccagaagttgagacaagagctgggtgtcctacgcaaagagag

SEQ ID NO: 10416 - DNA, 395 bp, Triticum aestivum
  Clone ID: LIB31-009-Q1-E1-G2
gggtcgacacgagacattctgcaatgcctgtgaagatgaccgagtgttagaatgcgagattcactaaaccatgtacaaggtaatgatttgggtgcgggatggattgatcaccataccgacttactcttattatttgccttgctatatgggatggtaaatctgagtgacatacctatagtagagcgccgacgatcaaaaccttgtttaagccttagaatggtataggaatttttcccttgtacaaggcagcttttgccaaccataggttatacggtgaggatcagcccagacccatttcctggaggagaagccataaatggttgaccaccatgagatatcaagagttgtttagtactgacgccagacccgtcaactaggaagacccagtctcggaa

SEQ ID NO: 10417 - DNA, 410 bp, Triticum aestivum
  Clone ID: LIB31-009-Q1-E1-G3
gggtcgacacccttggggattctggatcattggagttatttatagagcaaagaggtggtgtgggaggccaccgaggctggcacaacccaccagggcgcgcttgggcccccaggcgcacccaggtgggttgtgcccccttggggcacccctttggtacttccttggcccaacttgtgtcttctggtccagaaaaaatcaccaaaaagtttcactgtgtttggactccgtttggtattgattgtctgcgaagtaaaagactagcagaggaatagcaactgacactgggcactatgtcaataggttagtcccaaaaaatgatataaagttgctataaaatgattggtaaacatccaagaatgacaatataacaacatggaacaatcaggaattatagatacgatggagacgta

SEQ ID NO: 10418 - DNA, 427 bp, Triticum aestivum
  Clone ID: LIB31-009-Q1-E1-G4
gggtcgaccatgctcttcaagctgaagctcgagctcttctccaagcggtgcaaatcacctcatcaatggggtgtaatcaggtgattctagaaatagattcgactgtactgaagaatgctatcacatcaagcgagtatgatctagcgccgctaggtattctatctagagaaataaaagccatgttatgtgttactccctccgtttctaaatatttatctttctagacatttcaaatgactaacacatacggatgtatgtagacatattttagagtgtagattcactcattttactccgtatgtagtcacttattaaaattgccagaatagacaagtatttgagaacggaaggagtagttttaaaggctttacaagatcggttgtaccaagatcatgtaaagttggtactcatgaactagctgcgcgtg

SEQ ID NO: 10419 - DNA, 439 bp, Triticum aestivum
  Clone ID: LIB31-009-Q1-E1-G5
ctcgcgggtcgacacggttcacgacagtggctacacttaggtgcattggcatgcttggaaaaggtggatgtgctacaggctgcgcttgttgcctccatgcatcgtgccacgccgtgcctagtttatgtgcaatatcgctgggtggcgggaaacaggtgaggaaatggcaggaaatagtggcgtgttcaattaatggcaggaaacaacatcaattaatggaaacatagcatatataaggaatatcgagctagcacaagaagtagatgatgatgagatgaacacataccacactaaggaacccatcggtgaagaattcatcaatcccaaatggttgtacactagcaagcatttgcccacaacacacacgggttatcccatcacagacaggtcagatggattaactgtatgccatgtatacacattgttcaaaagtaatgca

SEQ ID NO: 10420 - DNA, 422 bp, Triticum aestivum
  Clone ID: LIB31-009-Q1-E1-H2
cgggtcgaccaaggaaagggtccgcaaccggtcgtctgtcaagttcggtataacatggaaacttgtgtggggccaaagaaggttttggctccagcgtgtctggccatctgccatggtacatgatataactgaagttacatcggtccactgactggacataaaaaagctcgcaatggatgtcaatcgaggtccaagtcgtggtggctcatgtttagagtgtgcgaagagagcccagtcaaacacctctgcaactgcgtggctatgttccaacattttgtgtcatgcgccatcgccatcgccatcgccatccagttgtaacaaactctgtgtctataataataatagactgctttgggacataataggcgagagctaattcagtagggagaggctagggttgacgtctttcgtcctttccttct

SEQ ID NO: 10421 - DNA, 142 bp, Triticum aestivum
  Clone ID: LIB31-009-Q1-E1-H5
ggtcgacacaactcccgaagatgcttcatctaatggcaaggatggttgcggccaacgccgttcgaacgccggaagttgcaaccctatacgctggagctacaaccggcgactgggggagctgccggaggggtcggggtttttt

SEQ ID NO: 10422 - DNA, 415 bp, Triticum aestivum
  Clone ID: LIB31-009-Q1-E1-H8
ttcgcgggtcgacataaaataataaccttcgccagacgggcacaacccacccagttgataccctgctcctctgaacaacaacaaaaacatcgctcaagaaaaactgtgctcacacctcagaaacaaaaatactgctagatctgctgggtcccagttgtcggccgctccttgtgcaattctctcgtttattgactatataggttgacgatggtgtgggaccgtgatgtcaggaaaccaggatgaagcaaaaaaattatagttgtatataataaggacgaacttgcgtacatacggctatggccctggtgggtccctactgtcatccttgccaagtgatctcctgattcctcatgttcgttgaccatgtttaaaatgctcggtgccacggtgagcgcaacaactcgaaggacgacgg

SEQ ID NO: 10423 - DNA, 273 bp, Triticum aestivum
  Clone ID: LIB31-010-Q1-E1-A3
tcgacacatcccactagagtgcgtcgtattacgggtccctcacaatcatgaagactatgaccgactttattacctatatatagctctggaaggagcacacccactccgatagtcgtgttagcggccctgatctcgggggaatgtatcagcagatgcatgcattttcacgccatcatgaggatgcgacaggagcaaccgatattgattacaccacacccagtagatccagtgaacacttagctgcagatgattccaatcttgatctacagaact

SEQ ID NO: 10424 - DNA, 338 bp, Triticum aestivum
  Clone ID: LIB31-010-Q1-E1-B12
gtcgacttccatcaaagcgatattcatcatatcatcgaaagacgggacacctttgcctctatcaagtggtatcagatttccaggttgctcggtgagattttacagtttttcgtagtttagatcgagtctgttcggtcatacctacagtccacgaagaaagccacaaagaaaattagggttagttcatcatatccgaaccaatctgagcctttgcataatctttttaggatttttgctttgttgaatttgcggttgcatcgtcgtgtcaagttgctggtcttagagtctggtcataagttgtcacgccgccgccgcaccatcgtcatcgctttgccatc

SEQ ID NO: 10425 - DNA, 386 bp, Triticum aestivum
  Clone ID: LIB31-010-Q1-E1-B2
tacgcgtcgaaattccaggtcgaccgctgcgagaaagacgacataatgggagaacgcaagagaacatgtctagaaaggctgctggcgaggagccgttgccagaagaagatccatccaaccctatcttcaagccgcttcctgagccatcccgcttagagggttatctcgtaaccaatcagatctcgagctactgcaaccatatcaatggggttgctggccacagtttcaacaggctatacttgatgaaggcgttgcaggaagattaggtgccgggtggcagctgctgtgagattttaacttgacactgtaccgcacctcaattttgcaatgtactccatgtgcacacgcacattgcctattttgttttgctcaaaaaaaaccgaaaa

SEQ ID NO: 10426 - DNA, 422 bp, Triticum aestivum
  Clone ID: LIB31-010-Q1-E1-B3
gcgtgcggaccctacgggttcgagaactatgtagacatgaccgagacatgtcttatgtcagtaaccaatagcggaacctggatgctcatattggttcctacatattctacgaagatctttatcggtcaaactgcataacaacatacgttgctccctttgtcatcggtatgttacttgcccgagattcgatcgccggtatctcaatacctagctcaatctcattaccgacaagtctctttactcattccgtaatgcatcatcccgtgactaactcattagtcacattgcttgcaacgcttatattgatgtgcattactgagacggcccagagatacctctccgacaatcggagtgacagatcctattcgcgatatatgccaactcaacgaacaccattggggacacctgttgagcacctttat

SEQ ID NO: 10427 - DNA, 298 bp, Triticum aestivum
  Clone ID: LIB31-010-Q1-E1-C12
gtcgacgggactgtctcctctaactgatagcacatcgccggaaattttgaaataaatccagaaataatgcaagcaccaggacttgaacactggtgggctggggataccactgtccctctaaccatccaaccacaggttagtttgcattagaaaaaggttgttgacatatacagaaaatgtagaatgaaaacaaagtagaaccaagaacatcaaaaaatgggaacacaacaagagacaagacaaacctaacgacaatgaatacaaacaaatgtggaaagaagaaaaatggagtgaaaac

SEQ ID NO: 10428 - DNA, 395 bp, Triticum aestivum
  Clone ID: LIB31-010-Q1-E1-C3
tcgacgtcgaccactacaatgtctaccatctacatcgatcgacgggacaccttggcctctatcaagtggtatcagatttccaggttgctcggtgagattttacagtttttcatagccatatactaccaccgcgaggaccaccgctgccatataccagcaccacatatccaccatcaggctgagttctttgcttattaggtttgttttcgggatccatctaaattccgagtcgtgtttccatgtcggagtcaggtagccacgctccgtttatgcccaagatttttcgaaaacgcatttttcgaacaaatttctggctatcctatttttacgtgtgtctgagtgttttgagacacgtgccactatatgaagttttttgtgacccatttccagttttt

SEQ ID NO: 10429 - DNA, 381 bp, Triticum aestivum
  Clone ID: LIB31-010-Q1-E1-C4
tcgacccgcttctcgagatcgagtcttagtaccactatctgatggtcatggtgctttgtgttaggccattttttttagaatcgcgttggaccacttaactttgccacaaggatattttgtttgtaaagatgagtatatcaagccattgcatgctatttacatatctagcatctaaatcaggttatcgacatagttgcatcaatcagactagcaaatcgtcactctggatgacatcaacatcttatcacaggatttaagccccatatggatgccggtatagccacatgcattgtcaagactctgtgtaagggtgcaaaccaaaggatagctaaccgtccattatccaaagtcctagtatctgtcactagctctaataacatt

SEQ ID NO: 10430 - DNA, 333 bp, Triticum aestivum
  Clone ID: LIB31-010-Q1-E1-C6
gcacaggtcctagactcgcgggtcgacatcagtcggtaaatcgtctactggaaacgactcacttgagagtgccaggaaggagatcgccctgtggttccctgagggcattgcacagtggaggagcagccagcacaactggatctgtgaggcggaagatgtgtcatgagtggtttgagtgcacgtttcattaagcatctaccagactagtctttggttgtttacagttttgagatttgtatcttgggaaccttgtttgtgtgaactgaagttatctccttgtgcttgagcatgcaagcgttatctgctgctctacatttgatatatggtattgag

SEQ ID NO: 10431 - DNA, 356 bp, Triticum aestivum
  Clone ID: LIB31-010-Q1-E1-D11
ggaaatgcaaattcgaagaggcgaacagcgcctatgaggatctcaaccagggcaagatcgttggccgagctgtagttgaaatcatgtagtgctgactgctgacgagatgatcatgtggttgaaaatctgggtcaaacagataagaatatgccgcggcaactccgcgaactcggtttgtgttgcagcacggtctcgctccctgatttgtgttggatgcaaaaaaatttgttgattgaaagattattgtgctcacaaggagatgtctgtctcagtgtgttcttctttccatgatacatattgtgaatattgggtatacactttgcttatatagttctgcagccagatttctgggttct

SEQ ID NO: 10432 - DNA, 450 bp, Triticum aestivum
  Clone ID: LIB31-010-Q1-E1-D5
ctcgtaggtcaacacaactccctaaagtgagtcctaatatcactgaaacaaccatggagtctggtccatgttgtggccgagtaaactctttgtccctcacttgtgttgtcaagtggtgcggcaggtcgttgttggtggactacataaaaggaaatagtgacatacatgtttctcgtgttcaagcagtttcttgcaataattgttatccgtgatataaggcatgcaactgacatttggtaaatcatggtggcgttagaaaactatttctacgtcttttccacttctcagtgacggctataggacgaagacctcatcccttctaggctcacctgtgcttttttttttggcgaggtaggcccacctgtgctttgcatctgcgctcaccacaacacagatacaagtaacaggtgaccaaatagcaagcagaaaaatccacagtgatgccaggcg

SEQ ID NO: 10433 - DNA, 303 bp, Triticum aestivum
  Clone ID: LIB31-010-Q1-E1-E1
tcgacgaaagtccctataatgagtcttgatacctccgccgtcctcgccgtcgcctccaacatcgtcacaaccatcatccgcaaggctcatgcctatatcatggttcatctcaacggttcaatgcccatgtcattggtaggtactcacgagcctgcaacctaatgcgaactggattccatcagatggcctaacgcttatttttacaagatgctgaacgccagcattgcttccatcctgtagtccaaactgtccatccccaagtcccgcttctacctcaagttccaccattcaaatcgctcatac

SEQ ID NO: 10434 - DNA, 310 bp, Triticum aestivum
  Clone ID: LIB31-010-Q1-E1-E2
tccacacgacaggatgttgatcgcaagcacctagtgacatgcgtcagggaaatgcaccccagtgctcatatctgccaaatggcgatcgacattaccatgcgtacttgctgacgaaaccttagccagcgtgagcacgggctcacaactccctcgtcaatcctgatctaaggaaccacacctcaggcgcaacatgggccatgcccttaacgttcactctactccttcattactatgtgaacccgaacattcagatgcagacgatagttacggaattcacctccacatgaatctgccgcacgcgttgactcaa

SEQ ID NO: 10435 - DNA, 122 bp, Triticum aestivum
  Clone ID: LIB31-010-Q1-E1-E3
tcacacatgccactaaacgaagtcattgcagcatcccgaggggaagtcggcgtcgcattctggaccatcgaccttcatcgctgccccgtggatccccctcgcgattgcctgcaatcttctcc

SEQ ID NO: 10436 - DNA, 440 bp, Triticum aestivum
  Clone ID: LIB31-010-Q1-E1-E5
cacaggtccgagactcgcgggtcgaccagagttgcccggcccgatccaacgcctcgtccgacggcgctgccggccggcgatggatatggagaggagctcgggtcttccttgtgtatattagggcagcagtagttttagtttgtcttggcttcatgccgtggtctggcgttatgccgtggggatgcaaaccactggagctctcgagcggcgtctggtggtggcctccgtcgttttctttcttgccaccatggtggtggaaagtggaagacgccggatctggcaagatccccttgaataagctcgttctggtgttgtggtgttccctgatctggagggcatccaactgctactgcttgttttctcaggctaccatggtggtggatgagaagcaggatagttgcagaatcctgaagtttataggtcgagttcgagcatatcag

SEQ ID NO: 10437 - DNA, 343 bp, Triticum aestivum
  Clone ID: LIB31-010-Q1-E1-E8
ctcgctggtcgacatgacacactatattgagtcctatgacaccgacgacgaccaggatgccgagtttgatgacatggaggattatatcgacgacgcggactgggacgccgacatgtatgatgatgtgttcgatggctgaaggagctgtgactatgaccgggtccggttctcacgtggaaggaaggacgggaacttggtgctgagacaatgtggtcgttacctgtgtttagattcttgaagctgggttctcgtacgtctgttaactagtctgctactctcttgctgtgaaactgggttcgctttctctccgcgactgtaattttatgccgcacctgtgatttgg

SEQ ID NO: 10438 - DNA, 409 bp, Triticum aestivum
  Clone ID: LIB31-010-Q1-E1-F1
cgacgcgttctttttaattttttattttttttttttgcggaacaggcaaccggaagtgggtcataaattcattcagcatcatccaggacattttcccaaacaaaaatgtcaagcttgtccctatctgtctcaggagaaggagttcctccgcagtaagtaatcctgttattgtcttcacaacacagtggccacagctgctattccaatattccaactggcactactctaacggtcactagggagctaaactaaactaccagtacgtactagtttatcccccatggatcgttgggtcgaccatactaatcacaccaccagctccccatttcctcaatcatcagggggaccaaaatgtcctgccgcattgaaagttgagacagctagccgtgactagaactgcagattacac

SEQ ID NO: 10439 - DNA, 396 bp, Triticum aestivum
  Clone ID: LIB31-010-Q1-E1-F11
ctcgcaggtcgacgacatacccgacattgtgtcccctgattgagagatcaaataccctgtgaacactgtcggcatcgacacggatccttcccctgcttgggaagaccatttcagagctctctagctagtaggactgcacgaggaatttagtgaggtatgctggaagtgcctctgataagttcaacagacccccaaaaaaccttgaaactaactcagacttctgcggtgggggtagcgagctattgaacttcgtaaaccgccctggtgatgcccttatccttcccgcttgtgatggtagctccacatcttgcccccctcatgcacctcatatccactgccctgttgatcagaaaaataaaaacaataatcacaagacagaaaactggtctgaaaaat

SEQ ID NO: 10440 - DNA, 225 bp, Triticum aestivum
  Clone ID: LIB31-010-Q1-E1-F2
aggtcgacacagatcccaatggttcatcatatcatagcaccctcacaaatgggagcctatacatactccatccgtcaatctcctggtggatgctccatcttggaacgagactcccaccaccgctgcctcaggataggattccgtgaatttctttgcaccatgggccacaggagcaggtctaggtactcccgcgcgactctcttcgggagtatagtcaccttttcg

SEQ ID NO: 10441 - DNA, 257 bp, Triticum aestivum
  Clone ID: LIB31-010-Q1-E1-F6
ctcccgggtccacatgaaccacacaagtacgccggacatacccaagttccgggctctccgcagagataacacccctaatcgtgccgatcgtggtttatacgtggatggtactagcttgctcctagacttgttttggggacgaatgaacacattccactgcaaacgatgcgccttcttcctgcatgtgtgtctgagtgtatgccaaaagtcctaccgtactctctccgtacctgtacgcctcccagggggttttatac

SEQ ID NO: 10442 - DNA, 345 bp, Triticum aestivum
  Clone ID: LIB31-010-Q1-E1-F9
ggagaaaggttggaccccgagcctatttataaggaaaatggataaggcaggcgcggggatcgaggagcctgaagcggcgaaagagggcgtagttgtcacctcgatcttcaggataacattaatgaagggaatctttttaatcattttagatagagatgagttcatgataatccgttgctgtgtccagaggatgacgtcacggcagtttaacaaaatttacaggagaagacatcatggtggtttacgagaaatataacgagatgttcacataatttctttaagtattgaagattgacatgaatacgttcaaatcaatttggagcctaatgttggggatataactac

SEQ ID NO: 10443 - DNA, 434 bp, Triticum aestivum
  unsure at all n locations
  Clone ID: LIB31-010-Q1-E1-G3
gtccactacatgacacttcaccattatttgggcctagaggaaggcattgggaagtaataagtagacgatgggttgctagagtgacagaagcttaaaccctagtttatgtgttgcttcgtaaggggctgatttggatccatatgtttcatgctatggttaggtttaccttaatacttctgttgtaattgcggatgcttgcaataggggttaatcataagtgggatgcttgtccaaggaatgacagtacccaagcaccggtccacccacatatcanattatcatagtactgaacgcgaatcatatgaacgtgatgaaaactagcttgacgataattcccatgtgtcctcgggagcgctttcctttatataagagtttgtccaggcttgtcctttgctaaaaaaagattgggccatcttgcttcaacttatttactt

SEQ ID NO: 10444 - DNA, 422 bp, Triticum aestivum
  Clone ID: LIB31-010-Q1-E1-H11
actcgcgggtcgacgtcaaacactacgatgacgtcgctatcacatcgtaagacgggacacctttgcctctatcaagtggtatcagatttccaggttgctcggtgagattttagagtttttcgtagtttagatcgagtctgttcgtcatacctagagtccacgaaaaagccagaaaaaattagggtgagttcatcataaccgaagcaatctgagccttgcataaacatttctgtaattgctttggtgaatttgcggttgcatcgtcatgttcagttgctggtcctagcgtcaaatcctttacagtttcgagttctgttcacaagttgtcacgccgtcgccgcagcatcatcatcgccctggcatcgaccaccaccgctccgaatccgtagccatatgccagcatcagtccgtgtccagaaagc

SEQ ID NO: 10445 - DNA, 420 bp, Triticum aestivum
  Clone ID: LIB31-010-Q1-E1-H2
gtcgacctcctccagcctccacccgcgactgttcatccactggctcctgttcacccagcctccatcgcgtgctactccatgggctactgttcaaccagccctctccacgggctagtattcaaccacccctccacgggctactgttcatccagccctccaccggctactgctcaaccagccctccacggggttgtcctgttcattcagccctccacggggtcttgttcatccatccgcaaccggctcgatcggggtcttgttcatccagatgtaacaccactatgtcctgttcatccaacctcaccgggaactgttcatccaccccccagcaacgctcattgttcatccataggcagcatcgatcggctttagttatcatcagtagcgaaggaatcgctcgatcactcgggttcagtaacg

SEQ ID NO: 10446 - DNA, 446 bp, Triticum aestivum
  Clone ID: LIB31-010-Q1-E1-H4
caggtccacatgtggcacagcccaatagaggtccattcttgtgaaaaggctggcccgtttgacttggtcaaaaggcagaggcctagcccatggaaagcctgttaatggcctgttcgcatatagcccatttacaacccgctaactcatagcctattacgacctatccgaattaggcccagtagcgtcatctaggccgtccaatatgattccagtccattgtaacttccggcccatgtacggcccatgacgtcttttggcccatatgtggccctttataactcttggcccattaacagccgtggtgcaactagcccgtaatgaacagtgtatcgctttatacccattagtggcccattattccattgggccatttccagcccatgttatctttcaaccttcgcagggcccatttattcttgggctcatttcagcattcgggttactac

SEQ ID NO: 10447 - DNA, 456 bp, Triticum aestivum
  unsure at all n locations
  Clone ID: LIB31-011-Q1-E1-C4
ttcacgggtccactcacgaggttttagtattccctacatgattagcataaaaatatatttcaaccaacagagtcaccgctcatattacgttgccatgccataccagacataaccgtcccgacggagaccggcgacaaactcatgcctacccaaggcagaggttttcctgggttcctgccggtatgcatgtaaggcacatgaggatgattataatcacaagtatgatcatttccaacagcatggaaatcactaacatgcacccatgcatatgatcatatcacatgaaataacaagattctccaaagtgaggtgatgttataaatgtgtcatcaaacacacaaaaatattatgccggggttcagaatggttgccttcaggtcatggaaaggcanggtgcatttcaaactcttgaaatacttctcctctcttcanaaaatcctatttttgaaaatataa

SEQ ID NO: 10448 - DNA, 127 bp, Triticum aestivum
  Clone ID: LIB31-011-Q1-E1-C7
ctttcaacattgcagcgttttaactctggtcaagtccctgatgttgatcgctaccaatgtgtacaatcgtgagctggatatcgaaactgttcatcttgttatcaactatcacatcccagggtttcca

SEQ ID NO: 10449 - DNA, 278 bp, Triticum aestivum
  Clone ID: LIB31-011-Q1-E1-E7
ccgtcattaacaatccagtagtcgcgcagagcgctcctgtcacacccacgatgcgggtatatcccccacgtgtcgatgcaccacttagatgcataaccgcattgggggtgttacaacttggtaatcacagccatccccgacttatgacccccccgcttgatcgaatcactgacgttgttgagtccagaaccaaatgccttgagtcttaagattatacatatccgccagtacgactctttttactcctcattcccttccgcgcccctggcgacgccccc

SEQ ID NO: 10450 - DNA, 330 bp, Triticum aestivum
  Clone ID: LIB31-011-Q1-E1-F8
ctctacgatagattgagcggaaagaatagcttcatgttattttactacgaactcttcaatagatagatcaaaacggataactttgaggtggtttcgtaggctaccataatctattcgtttgttctccgctattaatgtctctggagtgactctttgttgcatgttgagggattgttatatgatctatctatgttattattgttgagagaacttgcactactgaaagtatgaaccctaggccttgtttcctatcattgcaataccgtttatgctcacttttatcgcttgctaccttgctgcctttataatttcagattacaaataccttta

SEQ ID NO: 10451 - DNA, 438 bp, Triticum aestivum
  Clone ID: LIB31-011-Q1-E1-G8
attcccgggccatggattatacgcactctcacccttccatcattgctagcctcttcggtaccgtgcattgccctttctcacctcgagagttggtgcaaacttcgctggtgcatctaaaccccgtgatacgatacgctctatcacacataagcctccttatatcttcctcaaaacagccaccatacctacctatcatggcatttccgtagccattccgagatatattgccatgcgacttccatcatcatcatatacatgacttgagcatttattgtcatattgctttgcatgatcgcaatatagctagcatgatgttttcacggcttgtcctttttttatgtcattgctatgctggatcatcgcacatcccggtacaccgtcggaggcattcatatagagtcatatctttgttctagtatcgagttgtaatattgagtt

SEQ ID NO: 10452 - DNA, 409 bp, Triticum aestivum
  Clone ID: LIB31-011-Q1-E1-H8
tgactgtgaggagtgtctgagacacgtgcacagcttcaccggtgtcagttttacagggggtaccacaatgggggaggcggcgtctctatatacccgctatctctcgcgagaggggagagagcgttttgggagccgcatgtggacaagtttcaccgcgatgatgctcaccgcgatgagcacagatctcttctctgtgttggtatattatatgatctatatctacttgtgttgtgtggacacactcactacactcggtctcgagacatgtgttataatgtgctatctctgtgctctctcttaaatctcagactcttataatgagttgtgttctcagactcttatgaggagttgtattcacagactaaactcctatagtgttctatgagtctctggttgatgtgtgcggtct

SEQ ID NO: 10453 - DNA, 428 bp, Triticum aestivum
  Clone ID: LIB31-012-Q1-E1-B6
tgcaactacatcaatcgattctcttcgtctttggtggtctgcaccttccgtgccggctgtggaagacggatgacgcagtgctgttatggcgctgacaggcagctgttctacttcggctctccgaggcaatctttcatggcacatgcaattgaaggtatggactacaagagtacagactgttatatatctggaaggcgaaattttggggctgtatctgattattgaatgacagacagttatatacgagataagattcctaggtttgccatgacatataagattgtggcaaggccgtgctcgttttagaggacatgggatacatacaggaagcagctgaaattgatgttggcaagtctggtatttagaagatatctcatgaagtcattcatcaaacgtttgcgaacaaaccatttgtcatcctggacatg

SEQ ID NO: 10454 - DNA, 411 bp, Triticum aestivum
  Clone ID: LIB31-012-Q1-E1-C8
cctacaacacgctgaagatgcctgggccgatgaccgtcgtcaccgtcccctgcgacaagaaggatgcgttgatctgcgccgacctactcaaccaataggtcaaataccagatattcaacatgtccataaccagggacacgactaatcataattagtttatacactctgcagaggtttgcgctcttttccccacaagattcgatctcccccgttgaatttctcgcactgcctgatgtttgagaaatggatgatcgagacacagtctttctaaagaggtccccttaaccgatagataggccggtacacctacaatcccctacatctgctagcctatcatggaaaggtttcccacaacttactcaactatgccagagcccataatggcttgtggctgcacacggaagtttctag

SEQ ID NO: 10455 - DNA, 391 bp, Triticum aestivum
  unsure at all n locations
  Clone ID: LIB31-012-Q1-E1-D1
gttgcagcgtcttctgaaaaaaaatgtaaattatagcaacatgagtacaaaggtacccagcaagacttacatcagatcctacatacatgcatattatcaagaagggttggtggagttgttgcagcaagccagctttgactcttggctaggccaacctacgagactccaacttgaaatggttttgcgtacacgagtccactactcaccacttcaatacactaccgaggatccgcctccgtcttcctacggaagagccatcctcggcactcacacttatcttgaggcttttagtagtttccatttacttgtctatgaactgtataggcaaccaagtagtcctttaccgcggacgcggctattcgaatagatcatgataaccctgcanggggca

SEQ ID NO: 10456 - DNA, 413 bp, Triticum aestivum
  Clone ID: LIB31-012-Q1-E1-D6
accgaggttttggaattacccttttaactcaatcaccagcttctgccctttggtggagttcatatggtggggctcaacatgctatctggaggagcttgggctacggaaatggtacgcagaagaaaccctcccatacagaacttgttgctgtgcaagcaacagctggaacaattgctggagcttgctcatcgattatcactacaccaatagataccatcaagacccggcttcaggtaatggacaactatggcagtggaaggccatccgtcatgaagactaccaggctgctactgcgagaagaaggctggagaggtttataccgagggtttggaccacgctttcttaacatgtctctgtggggtacatcaatgattgtcacatacgagctaataaaaagactttctgtgaaacct

SEQ ID NO: 10457 - DNA, 358 bp, Triticum aestivum
  Clone ID: LIB31-012-Q1-E1-E3
ggagctgcctcgcctccatgagaaagtccgcagcagcatgttcttctgctgagccagccagccagccgcacttgcgcgttccaacttttggcgatgcgcttggttatctagtactagtagtatgtagtagtggcctgtgatggcctgttggactcctgggatgttgtgttcctaagctggttgccgcacttggtgcctcagaacctttactatcgaaccatctaatttgctgcaaaaaaaaaaaaaaaaaaggaaacgaaaaagatcgggaagaagaacagaagagctaaaaagaggggaagcgggaggagagagacgggcaggggaggaggcgcaggggcggtaggggggggtatgg

SEQ ID NO: 10458 - DNA, 398 bp, Triticum aestivum
  Clone ID: LIB31-012-Q1-E1-F7
tggttcggccctcgtaataccatgaccattagtccctggcccatgccaactttcaactttcaactttctaaaactaatggcactaacagaaagtttataattttgctccgcgcccctggcccatgaccattagtcctggtttgtgccacaaaccgggactaaagggttggtccttgttgcgggcagagtttagtcccacctcgccaaccgaagggggctcacaccagtttataagcccttccctctctgcctcattgagctcctctcaaagtgaaaatagatgccctaatagagaaaagtttaacctaaattcatagtgaatttctctgaaattcatagaaatttactaggaatttaggttgaattttctctataaacgcatccattcgcattttttt

SEQ ID NO: 10459 - DNA, 429 bp, Triticum aestivum
  Clone ID: LIB31-012-Q1-E1-F8
gcgggtcgacagtaccatcgaaaatatcgatatttgctttttgaaccaaaatgttttcttaggaatccttttgtatgaattgctcgaaaagtttttgtgggcgatttgtggtctaccttcagagactgctcgcagacgagagctcatgtatgaggcccgtgggcgtcaaacagggagtcttagctggaaacccggttgttgttttttaggagctacatatttttataacctgttaaaaatagaaaaatatatattttttaaaaaaaattgttccttatgtgttatctcataatatataaacgttcggtgtatataaaaagttcaatgtataataaaaaagttcggagtgttataaaaatgttccatataattgagaaaagttcaccttatattaaaaatgctcaatgtacataaaagcgtaaaatgttc

SEQ ID NO: 10460 - DNA, 116 bp, Triticum aestivum
  Clone ID: LIB31-013-Q1-E1-A1
gtccacgtccaccacctagaaaaccaccatctcatctaaatactggacacctttgcctctatcaagtgctactatatttccacgttgctcggtcagattttacactttttcgtacc

SEQ ID NO: 10461 - DNA, 402 bp, Triticum aestivum
  Clone ID: LIB31-013-Q1-E1-A10
taccggtcctacattccggggccacgctgcacctcgtactccgcctccgcgggggcatcatcgagccctcgctccaggccctcgcccgcaagtacaaccaggagaagatgatctgccgcaagtgctacgccaggctgcatccaagggctgtcaactgccgcaagaagaagtgtggccacagcaaccagctgaggcccaagaagaagatcaagaactagagctcgtaagactgtcatcgccgctttcgttgtctgggtaaatcagtagacataaaatgttttccggttatcgttttgctgcccctcatgtcaggatgttgaaccttggttaactctagctgagtacttgcctcgttttaatgtcagaactgaagtgaaccttggcaaaaaaaaataagagcgg

SEQ ID NO: 10462 - DNA, 402 bp, Triticum aestivum
  Clone ID: LIB31-013-Q1-E1-A11
tcatgggtccacgtgcctcgatatattgagtcgtattattacattgcgctaccatggaaaattctcatcaagaggccatagacaacggcttgttgtcttggaaggacttgttctacaagaatacaagaatgggcagaagcaacaaacaaccgtagccgtgcaagtaaatgatgcaaatgaaagtaatgaattaacagaatctaagcacaatgattatctggttgcctcccgtattcaaattatctatccacatacaagactatttattataattgcaatgacaattacgccaaactataccatttgtggtgtgttattcaaaaaactgtgaaccggtctattggaactacattacttatgcatggtgaatgtaaatcatggcaccacacatctatcatccta

SEQ ID NO: 10463 - DNA, 364 bp, Triticum aestivum
  Clone ID: LIB31-013-Q1-E1-A12
cacatttccctagaatgcgccgttcaatcctttgaaacatcctttttctgctcctgtagtggccaacgctttcctccacacattggtcaatctgcatggacccccacacaccattgtgtctgatggagacaggatattcactactcatttttggagagatttgttcaaactgcgggacactaagttgctcatgagtactgcttatcatcctcaaaccgatggacggagtgagcgggtgaaccggtgtttggagatgttcctcacgtgtgcagttcatgatacccctactaagtggcatgcgtggctgcccttggcataattctggtacaatacacattatcactcatctctggagtgctctccc

SEQ ID NO: 10464 - DNA, 442 bp, Triticum aestivum
  unsure at all n locations
  Clone ID: LIB31-013-Q1-E1-A2
gggtcgaccaggctgagaaaatgggacttgactacatggatgttgaaagtctcaagaagatgaacaagaacaagaagcttgttaagaagctagccaagaagtaccatgctttcttggcatcagaggccataagcaagcagatccctcgtctccttggccctggtcttaacaaggcgggcaagtttcccactctggttagtcaccaggaatctcttgaagccaaggtcaacgagacaaaagctacagtcaagttccagctaaagaaggttctttgcatgggtgttgctgtgggcaacttgtcgatggacgagaagcagatccaacataacatccaaatgagtgttaacttccttgtgtccctcctgaagaagaaatggcagaatgtgaggtgcctgtacgtgaagagcancatggggaagcgtgtacgggtgttctaagtgtg

SEQ ID NO: 10465 - DNA, 162 bp, Triticum aestivum
  Clone ID: LIB31-013-Q1-E1-A5
ataggatccgtctcttgggagccagggacaggtgcagaacgggaaggcgccatgggaatgggtgcgggagcgctgccggaaagagtgggggatctgggggggcgacgatcccggacgccgacaacgcgtgagaggacatgatgggcgtcaccgctcccaacc

SEQ ID NO: 10466 - DNA, 292 bp, Triticum aestivum
  Clone ID: LIB31-013-Q1-E1-A6
gaccaaagggatgactcaacataaaagtaaagagataagcccttcgcagatggaatcagggatttgtacaggtgctcgacctcgattataaaattgatattgagtattatgtgggggggcaaacttttattgtcagtacaatgacggttagatggccgtatcggctacaattttggcggtattacatgtttgcttgagcttggtcaaggttcattttctccaatcagcatcaagcataaatccatggctttcccaaaagatcgaggtttacttacacatgacagccccgtgg

SEQ ID NO: 10467 - DNA, 332 bp, Triticum aestivum
  Clone ID: LIB31-013-Q1-E1-A9
gctgtcttggctgacatggattctattggacatgaagcacagctaagacgttttgaacttgccaaagctgttactcttgttgctgaacctttcacactacaaaatggtggcctcaggctcacgtccaaggtcaaaagaccgcgagctaacgcctacgtcacgaaagagctcgcacatatgtatacataactccgtgacacccaatcagctacgcacacgttgttcctactctacaaatgttcacgactacggttcacacctctccaggacaggctcacaccactcagcaccgatctctcatctgccttctcctcttgactactcttcacccc

SEQ ID NO: 10468 - DNA, 66 bp, Triticum aestivum
  Clone ID: LIB31-013-Q1-E1-B1
ctcatccgtatgatcacgatcgtccgaaacgccacacgacacgagctctccatcaacgtaatcgtt

SEQ ID NO: 10469 - DNA, 316 bp, Triticum aestivum
  Clone ID: LIB31-013-Q1-E1-B10
tcccctatatcgactcggactacgttcacctcgtcaagctctgccacaatctcgtcctaaaagggttcaacatgtggacattctggcagacatcggattcgtcgtcatgaggctacggagggttcttcgtcaaattcatcttcatcgttatcaacaatcatcatcgaccggtccggatgatcacgtcttcgcagatttcaggaccctttatgaaaggaaggtgtacactcaatttagccgttcaggttatcttaatctcagtccttaaaggaattcatttatgatttcaatgtatacgacagttcccttgtgtttt

SEQ ID NO: 10470 - DNA, 341 bp, Triticum aestivum
  Clone ID: LIB31-013-Q1-E1-B11
acggtacgtacttcacggggtcacagacgacagaagaggattcaatggatgaggggcagctttggattgatatcaagaatggaaagcaatttgattacccaagattacttttcattatcacaggtaaagggcctgatagaaataaaggggatgagcaaataaaaaggttaaaactcagacgtgttgccttccggactatgtggcttgcatcggaggactatcctctattgctaggatcagctgatctaggcgtttcgctgcatacatcctcgtcggcgcttgatctacctatgaaggtcgttgatacgtttggatgtggactaccagtttgcgccgcttca

SEQ ID NO: 10471 - DNA, 452 bp, Triticum aestivum
  Clone ID: LIB31-013-Q1-E1-B2
gggtccacacgaaccactaagtgcatgattctatgcacaacgctctctctatctaccgcgagggttggcaactctgcgtcaacgacggctaagcaccggctcttcgaggatttgcaggtgctgacacattgggccaacaccatgataatggcaactctgcctcgttaatgtcggccaccaacgatgataaggccaaaccgccccacatggccattgacctcacctccaacgggaggaatagattaggttttcagttgtttttagggttttctttgttatgtataaattacttcgaaatgattgaaaaatcggtgtccaccttatttgatcactctggttggatgggctccgcccagctggctatccacaaacatgtccgacaatttttttgaaggcgtacttatttgtattcaagcaagcggcaaaccaatacatgtacaattacaaataca

SEQ ID NO: 10472 - DNA, 258 bp, Triticum aestivum
  Clone ID: LIB31-013-Q1-E1-B8
catgccaaactaaacgtggtgctcatcgccctcaacatctctgccggtgccgcccgtgatgtcgatgaggacgactagtgatgagcgttcttgtccaccccagtgtactattgcaccgggcggttttgttgacgtctggcaccctgcccagcgggcctgttcctttgagttttggttatctctcttgagttatacattgtgtcttctggattatgtgccgtgctggcatttggatcttactcttaatccttgtgcaaa

SEQ ID NO: 10473 - DNA, 157 bp, Triticum aestivum
  Clone ID: LIB31-013-Q1-E1-B9
tcacggggtcacgcaatcgatgatatagacctctacaaggtcaagccattggacctcccggcaaggtcgcgcctccgcagcctcgactcccagtggtacttcttcagccgcctcgatcgcaagcatgccaaccgcgggctcagcaactgctccactg

SEQ ID NO: 10474 - DNA, 270 bp, Triticum aestivum
  Clone ID: LIB31-013-Q1-E1-C1
ctcaggttgaatctgatccttcccatggttatgaaactgaaactgttgtggcacatcttactaagttgaatgatatagccaccctttttactgatgatgagaaaacgggcgaggactttattctcaaattatttcctttcgcattacagggtgatgctaaagcttgggacaatactcttgctcctggttgtgtgcgtagtccccaggatatgatttactacttctctgaaaaatattttcctgctcatatgagacaagctgccttacagg

SEQ ID NO: 10475 - DNA, 200 bp, Triticum aestivum
  Clone ID: LIB31-013-Q1-E1-C11
cacggggtcacgatctggtttttatttgttaggaaccgtgtccagaattgtctggccgattcgactagctgctgaattatctggcttaagtcgtcagtatccggcggtcgcacgtaagtgccttggaaattcgggagaaatgccgcgtctagctccttccatgagggggttgactttgccggcacgctactttgccagtg

SEQ ID NO: 10476 - DNA, 430 bp, Triticum aestivum
  Clone ID: LIB31-013-Q1-E1-C2
gggtccaggcatcacacgaaacttctgcctaataagtggatgacatctgtcccaacgatgagccgacacgtatttcctccagccaatgatgattttacacgtggaaaatccccattggtcggggctgttaacggtttatcggatccaaaacccgacccgatagcttaacgacgttccattacggtggatgccacgtgtcggtcacccttgacgaaatcacttttgtgacacgcgatttatcgtcatggaagtgcacacttctgtgatgataattttggtaaagtcatggaacacttctacgatagcacaggtatgactatcttgattctgtcataaaatcgtcatggatgtacatgcatgacaaaaaaacgcgacctactgtgacaaacacgtatcatcacggaagtgtatttttttgtagtgattgtcc

SEQ ID NO: 10477 - DNA, 355 bp, Triticum aestivum
  Clone ID: LIB31-013-Q1-E1-C3
cttgtatggatggacatattgctagcctactccagtcatcgctacaatcggctgttacagcagtatgttactttcctatgatatcatgatggcttgcttatattactctcaacatttagtggggaaatattcatgctcataacatgcttttcttaatattgactccaacttgatatgatgttgtatgcctcttggtgcccctacccttcctaatcccagaacctttcaaagtaaagtggcatggcagttgcaggtggttactggctcgatcagacaacggctaacgattgatgatctttctcagctaccggacgtgttgtttcgcggaatacaatcatattcactggataggtct

SEQ ID NO: 10478 - DNA, 456 bp, Triticum aestivum
  Clone ID: LIB31-013-Q1-E1-C6
attcgccggtcgacataacaaacaaacgatggtgatatcttccatgctacacacattataggcggttcccaaacagaatggtaaagtttatactccccctccaccaacaagcatcaatccatggcttgctcgagacaacgagtgcctccaactaacaacagtcccagggggggttttgtttgcaattattttggtttgatttgcataaagcatgggattgggcatcccggtgaccagccattttctcgtgagtgaggagcggagtccactcctcttgagaataacccgcataacatggaagatacggatagccctaattgatacatgagctatttgagcatacaagacagaatttcatttgaaggtttaaagtttgggacatacaaatttacttggaacggtaggtagatactgcagataggaaggtatagtggactcatatggaataactttggg

SEQ ID NO: 10479 - DNA, 439 bp, Triticum aestivum
  Clone ID: LIB31-013-Q1-E1-C8
cagcaacattgaaaaatctgcagccgcgaccagtgaagcgaagaaagaaatcggcaaagcgtccaagactcagaagtcaaattcatccttgctttgcctgcttatggtgatctttggggttgttttgcttatcgtgataatagttttggcatcttgagacacggatgcttagaggcctattggtgccctctgaggagccatattacgtgcaagattaatcctcgctgtgcgccgaagactgtcgctaactgaagtgtacattttctttttctctcttcttttttccttgtggtttgtgagtgcgtattcttgtgtggcgcgagtcctttttttcccacggcttgccctgactgaacagtcatgctctttttcacctacaaaggtttgtttgctgctttgcttgagtcagaaacttgacattctgtaagtatttccactg

SEQ ID NO: 10480 - DNA, 299 bp, Triticum aestivum
  Clone ID: LIB31-013-Q1-E1-C9
cggtccattattcacggggtcacgtaatcacggtcatctcagccggctagttcatccgcaagcatctggggcgccagtctgggtccaaggcagcgatcgctttaagcattcttattccaagcactgcaaagtattcacactgcacgggggttcgtcagacgttcacattgcacagttcggggagcttaatccggacctgctgttctctgcaagtccactacgagaagcacaagtctatgtgctacaggctccatgtctatgtcctccctttcttcaggttctataggggagctcagggc

SEQ ID NO: 10481 - DNA, 312 bp, Triticum aestivum
  Clone ID: LIB31-013-Q1-E1-D1
ctccgagggaagtactgcgtgtgcttcgatccgctggacggctcctccaacatcgactgcggcgtctccatcgggaccatctttgggatctacatgatcaaagacaatgacaaggggactctggaggacatgctgcaacccgggactgacatgatccccgctggccaccgcatgtccacgacctcatgcacgcctgtgtgtagcaccgggaaccggtgtgcatggcatcactcttcatcgttcccttagggactccatacttacgcaacccaacataaagatcccaggcaaggggaaactctattcggtcaa

SEQ ID NO: 10482 - DNA, 323 bp, Triticum aestivum
  Clone ID: LIB31-013-Q1-E1-D11
taccggtccttcattcacgggttcgaccgtgtatataaagggatgacccggcggcggcttagggcaagaaacaacagattgagagccaggcaaagcgtatttgctccctggtaatcgaaaccctagcaataccacctcaaactggactaggccttcaccttcaccgcaaggggccgaaccaatataaactcctcgtgtcctttgtcccgtttaacccctttaagctaacctcgttgtaatggctccacaactaagtccttccatgaggacatctgccgtgacacttccacggcaacttcaatgcacatgttatgaaacaattg

SEQ ID NO: 10483 - DNA, 425 bp, Triticum aestivum
  Clone ID: LIB31-013-Q1-E1-D2
gcatgcatgtgtgctgctagctcttgatggatggtcactcgatttcagctgccattgtgcatcaccatctcctggatgccttgatatctgtgttgctttgttgatggttgtgtagctcttgacataatcggctactgttaacaacttgaaccagtaataatctgcttgatgatagaaaccttcttgttccttcagaataacagagctaagtgcagggtccatttttctgaacgaaacactggattcaattaagagaaaaaggaaacactggatttctccaccatatggcaagcataaaaagatgtctaatttggtaattttcaacgccttacaagttactgtacttgaataaccagaaaggaatatatgttcttttacaggtccagtgtggctccttcattcaggggacacagagtgcagagtct

SEQ ID NO: 10484 - DNA, 256 bp, Triticum aestivum
  Clone ID: LIB31-013-Q1-E1-D5
gtccacaatcacatggaatggtgattcatgaaacccatggtatgatgtgtaaacacagtcccccctggcgaatggaagtagcataactcggtaatcatcgccggtgatatgatcgatgattggttggatgctcggataattgagcccgaggaacatggagtggttgccgacgctgtaaacccgcctccaattgaatacgcctggccaaacaaagctgggatctttctcgaacacgaagcagccagagccgtcaatg

SEQ ID NO: 10485 - DNA, 400 bp, Triticum aestivum
  Clone ID: LIB31-013-Q1-E1-D6
gacgttcttgagcattttcggttcaactgtcttgttgcaggtgtgcatggtggtcgctcgtgttgttgggtcctattgtcgtggcgtttttgctgtctgcgtcttgttgctgctcgttggggggggggttttgcctcgtgggtcttgttgctggggtctggggtgtcggtgtttcgcgtctggtgtcttgttgccgttgcgttccgggcgtcgtgttttgctgtttcggtcttgttgccgcgtgttggggaagaggagatttttgtcacatggctcttgttgcagaagagttacacgagaagaggtttcacagcaggaacattgctgcaagaaattagagaacaggaatggtccgctcgcctcctacaatctgacagctcacgaggcagcgggtcttttt

SEQ ID NO: 10486 - DNA, 218 bp, Triticum aestivum
  Clone ID: LIB31-013-Q1-E1-E10
cctagggtttatggaatattggggtatttatagagcaaatacgcggtgctggacgcacctatgtgggcataacccacctgtgcgcgcctcggcccccaggtgcgccctggtggttcctgcgggccttggggcatccctctcttccctcttcagggcatcttgtgtcttctggtccactatctaaccacacctagttttgctgcttttcgactcccttt

SEQ ID NO: 10487 - DNA, 394 bp, Triticum aestivum
  Clone ID: LIB31-013-Q1-E1-E5
acacgagcaaataagatatgtcgtatttgctcgtcaggaccactgcacaaatattcgcttcgccggatgagatgggtgagctgatgactaaaatggaagattttacgcaccgagggtgggtctgcgatcactccatagtgttctgagggggattcaattcagcactagacagccaaaaggaagacacaataagctggccaagctcatatgcatgcacctctgccaactgaaccatctaatacctcaccggagtatgtaatgctatctacgctgatgaatgaattatctggtgcattatggttagcaacatggcatgctgttctgttttccctcattgatccggctgtccagtaacttgcttttaactgaacttctattggattgtcttagctta

SEQ ID NO: 10488 - DNA, 408 bp, Triticum aestivum
  Clone ID: LIB31-013-Q1-E1-E6
atgtctggcacgcgttgtgtgtgattcctgcttctgcctcgttgcgggtggctgcctgcgcgttggcggcggctgtgccgcttgtcctgctctcgcgtgccgggggtggcgcggcggccctgtccctgtctggcctgggtttcgcccgcctgcgcctggcccttgtggctggcctgctgggccgcgtcctgggcttctcagtcactgcccctggcaccactgcagctgacctgatggacatggtgctgatcacccagtactttgccactatgacagaagttggcgcgtcctccaagtcctcggcggtgttcatcccccatggccctggctctgtgctcgacatcgccaccagatccgcattgtcttcttcacggccagtctgcctctgacaactaagcacctttgctt

SEQ ID NO: 10489 - DNA, 66 bp, Triticum aestivum
  Clone ID: LIB31-013-Q1-E1-E8
tgtgctttctggtcgtcctgctgtggcgctgcctggttctctggtgtgcccttcttcctgtgctct

SEQ ID NO: 10490 - DNA, 245 bp, Triticum aestivum
  Clone ID: LIB31-013-Q1-E1-F11
accggtccacgactccggggtcacaactgcgccatcagccgcactcacatcatggacctctgcatcgagtgccaggcgaaccatgccagcgccaccagcgaggagtgcaccgtggcttggggagtttgcaaccatgcattccacttctgcggcatcacccgttggcacatgacacgtcacgtgtgccatctccactacagcgagtgggagttccatacgtacggtgactcacatcgttatggcca

SEQ ID NO: 10491 - DNA, 199 bp, Triticum aestivum
  Clone ID: LIB31-013-Q1-E1-F4
ggtggtggtagtgccattttcctattatacataagcattgattggatagagttaattaaacatcaatatttgttctaacgcaagcattcatcagatagagacaaaacatcggatagagggaaacataaatcgtccagaataagaatatctttctggctaagcttacttacgaatgttgttgattaaaacattatacatg

SEQ ID NO: 10492 - DNA, 157 bp, Triticum aestivum
  Clone ID: LIB31-013-Q1-E1-F5
gattgggccggggatttttctcatggtacaacgtaatcaccttaatttgctatatattcattcatcacttaacgcaatccctccgtcactgttaatcaatagggggggatcgctgttgcatcatttttgttctagcttattcttgactgtttcattc

SEQ ID NO: 10493 - DNA, 441 bp, Triticum aestivum
  unsure at all n locations
  Clone ID: LIB31-013-Q1-E1-F6
ccatccaacacaaanccacagtaactcatgccattttaagtgatataaaaactattcgctaattttcagtaaaccccttgttcttttgcttaataaacccacagttctatttttaagggagtttaaagactttttaaaatactagcaaggcgacccatgcgtcgcaactgaagaaaaaaaaatcataatctctaatggtcatgaccacattttgctgcatcaccgagatacactatcactttcattttcgtgaaatcgtgaacagtttttgacaatcatgaacatttttttagctgaggaacatatctggaatcgtgaacattttccaggtacgtgaacaattttagaaaagtgcaaactttgtccagagtcataaacgtgttaggaattcatgagcattttatactagttgcagaaggtgggggattatgaacatttttt

SEQ ID NO: 10494 - DNA, 441 bp, Triticum aestivum
  Clone ID: LIB31-013-Q1-E1-F7
cggcggaaaagaagaggcgatggcgtccgggtggggcatcaacgggaacaaggggcggtgctacgacttctggctggacttcagctcgtgcatgagccgctgccgccagccctccgagtgcgggctcctccgcgaggactacctcgagtgcctccaccactccaaggagttccaacgcaggaacaggatctacaaggaggagcaacgtcagataagagctgctgctcgcaaggccaaggaggaagccgaaggagctcctgctgttgcagctcaccactagcatcccttttcaatttttttcttatgcttttgtttgttgcaagcgcttccatgttcggctatgagcaaggcaataattacctaaacattgcaccctcgcacctccatgacttgttctaaaagcatggatttgatagactaccttggtcatcaaatttgtgc

SEQ ID NO: 10495 - DNA, 151 bp, Triticum aestivum
  Clone ID: LIB31-013-Q1-E1-G1
tttcgtgggttcagccgccccttctctggctcgttcccgtgttctctctcctttcgggcttcgtcgtcgggtttgcttcgttctttgtgctctgctgtccggggcgggggccggcgttctttctttgcctcccggggggtggttccttctt

SEQ ID NO: 10496 - DNA, 313 bp, Triticum aestivum
  Clone ID: LIB31-013-Q1-E1-G10
cgaagacgacagtacggatcatacagactatatacagaagttgatgccggactatcatccatccacagtatggtggagaacccaccttgcaaagccgaagacttatatccgcatactatatcaggggtgaaggcaacttcgggggctactgagggagtcctacattcgggggtcctcaagtgtccgtcccatgagtatcggccaggttggatgggtcatacactatcaagctgaagactatccttcgtgtccatgtgggacctctccatacgtaaactacaagattagagtccagatgtatcatttccttccc

SEQ ID NO: 10497 - DNA, 187 bp, Triticum aestivum
  Clone ID: LIB31-013-Q1-E1-G12
tctacatctaaagacggtacacctttgcctctatcacattgcatcatcatttctaggttgctctgttacattttacaatttttcctactttacatctattcggggcttcagacctatactctactaaaatactatggtcaattctcttagttcatcacatcctactcaatctaatcctttcaatttt

SEQ ID NO: 10498 - DNA, 139 bp, Triticum aestivum
  Clone ID: LIB31-013-Q1-E1-G2
ttccgtcctgggtgcccgtcctgtcgcctgggctgggggttttgttgttctttttggtctgtggcctctcggggcgtgtgtgtgtcctgtcctctggcgtgcggcgtgttttggctccttgctggtttccgcttgttgc

SEQ ID NO: 10499 - DNA, 169 bp, Triticum aestivum
  Clone ID: LIB31-013-Q1-E1-G3
ccccatcatcactatgtcagtcctgtgcatcgttgccttcactaatatctacaatctctgtcacccacttgttgctgctcgattcttgggacggggatctgtcgatctcgaaaacattagtgtcgtctcatttacttacccctcttatacatatccttctggttttgtt

SEQ ID NO: 10500 - DNA, 203 bp, Triticum aestivum
  Clone ID: LIB31-013-Q1-E1-G4
ctctcccgcttgctccgccgtggccccccgtgctgtcgtgctcctgcgtgcccttccgccgcgcgcgtcgtctgttttcttctcgcgggcgtgggcgctgcggctttggggtgggggcgctttctccgttgggtttgtcgtggcggccccttccctcgggtgcccgttgtttcttccgctctcgtccttgggtttcttttttc

SEQ ID NO: 10501 - DNA, 90 bp, Triticum aestivum
  Clone ID: LIB31-013-Q1-E1-G6
tctgtgtttgctgtgttctcctggtgtgttctctctcttctcctgttgtcctcttctcgcttggcctgtttgtttgtttgttctcgttct

SEQ ID NO: 10502 - DNA, 280 bp, Triticum aestivum
  Clone ID: LIB31-013-Q1-E1-G7
tgtggcttttggctgcttctgcggcctgcggcctgccgtctggcgtgcggccgctggtcgtcgtgtgtcggctcgttccgttcgttgtttgggcttctcttcggggtgcgggtgtcggtcttgccgctgttctgtggggtttctgcgcccttctttcgggtgctttcgtggcgcgtctgtcgctgtgctgctgcgtgttctgtgtgctcttgttcctggctgtcttgtggtctcctgtttgctggtttggcgcgttttcttctgtctgtgtgctgctcgg

SEQ ID NO: 10503 - DNA, 325 bp, Triticum aestivum
  Clone ID: LIB31-013-Q1-E1-G9
tcacggggtcacgacggactgaacactgcccctcctcaccttcatgagcggacgggggtacatccggctctgtaaccatcggtgatgatagaaatccactgttttttgaacggagagataaactgttactaccccggggcttttttagatcttggagacgataagagtgtgtgaatagagcaaccctagcaagcaagcgcggatgctccgggctatatatacataatggggtagttttcctttttcactccatcaaaacaaatcgtttacaattgtgtactactacatgccacgtccgtggtttttttagatgttgattgctttt

SEQ ID NO: 10504 - DNA, 413 bp, Triticum aestivum
  Clone ID: LIB31-013-Q1-E1-H11
caggtccgtagactcacgggtgcacgcagagttaaatactttggctgaatctgatcctttccatggttatgaaactgaaactgttgtggcacatcttactaagttgaatgatatagccacccttttttactcatgacaagaaaactcgctattactttatctaaaattagttcctttctcattaatgggtgatgctaaagcttggtacaatactcttactcctggttgtgtgcgtagtccccgggatgtgatttattacttctctagaaaatagtttcctgctcataagaaacaagcttccttgcatgaaatatttaactttgttcaaactaaaaaagagagtctcccaaaagcttgggggaggcttcgccagttacttaatgctttgccggattatcctcttaagaaaaatg

SEQ ID NO: 10505 - DNA, 330 bp, Triticum aestivum
  Clone ID: LIB31-013-Q1-E1-H12
gagtgtggacatcgagtgctccaacgctcccaaggatttccaggtcagcgggtggtaccaaggagcagacgacgattcagacaagcaaccacgcacgccgacaagcctaggagagttcacttaggacctcgagaagagcagcgcccagaccttccagctagacagaaccaccgccgacgcatctgtggtcaacattgtccggctcgacttctcctcgaagcatgggcagcctgagctggcgtgcatctaccgcttcagggtgcacggcagcgagcctggctctcttccgcaccgcggcatcgtgaggcctgatctagttagggcctgtgt

SEQ ID NO: 10506 - DNA, 275 bp, Triticum aestivum
  Clone ID: LIB31-013-Q1-E1-H8
gacgaagcgccaacggcgacttcgtaaatttaaagatgatatgccggctcagtctttcggaggtgctcatagaaggaagggtttccttgtgtgcatccaaaaaggtgagtgtatgcgtgtgtgcattcatagaggtgagtgtatgcgtgtgtatataaccccttgtgtctgtactaatgttaaaaaaaaagtttctgaaaagtaagaaataaacaaagagtagtatattgtgtacatatgagccggacacaccagcgagggctcccaaagccaac

SEQ ID NO: 10507 - DNA, 218 bp, Triticum aestivum
  Clone ID: LIB31-013-Q1-E1-H9
ggctgagcaaagcggtaacatagccaaacaacggtttgctacgaaaggtgggttagaggcttgtcatggcaacatgggaggcatgttatagcacgtggtgggcatcgcggcatagcaatggagcgaacaacgagcaagcaaagatataagtgatttcgagggtatggtcaccttgtctgagatcccgcaaggaagaataaccatttcattaagaagac

SEQ ID NO: 10508 - DNA, 261 bp, Triticum aestivum
  Clone ID: LIB31-014-Q1-E1-A12
acgcctccggcctatctccatggtatctcggctacctgtttccaaggatgagctctaagctataacattacgcacagttcgctccagccctcgctcgagtggcagctcgtttcatagtcccggagggcctagcaaccttacatcattaccacgtggggctttcaatctgctgacttttcctctcccagcagtgagggcgagaggattcttaagccttgtggaatattgtgatgtattggatggaacactggagtgtcactt

SEQ ID NO: 10509 - DNA, 215 bp, Triticum aestivum
  Clone ID: LIB31-014-Q1-E1-A9
gcgtccggaactaggcagcccagtatggggtcctggctctgccctcctcattctggtcctcctgcgtatactaagtgtgcagatctggcataagttttatctctgggatctccagcactgcgcgacggatttgactgggaagacagcaatggtgactggggccaacagtggcattgggaacgctgtgtcccaggagctggcccagcgcggggccc

SEQ ID NO: 10510 - DNA, 409 bp, Triticum aestivum
  Clone ID: LIB31-014-Q1-E1-B10
cgcgtccgtacaaattagaggaattattttgttgctataatactcctcagacactatgcagtacccattctatcacttgttaaatttatttctaacagagctcaaactttgggttgtcaatggggctaattaagggcatgatcttcaccctctttgaaaccgtgggtcacctgtgacaccatctggagaatgaaatatactcaggcggggcttcctggatgattctttcaaagacaaatcctcaagtgacttgtttctttggatttttatcctttgccctctactcttcccttttcacccatcatcgctcccccactcccacacctgggaagatgcaatgcctgtggctgaagcagcagttttgcaaacctgagaacaaaagacatgtgttgctaagcatactgaagga

SEQ ID NO: 10511 - DNA, 325 bp, Triticum aestivum
  Clone ID: LIB31-014-Q1-E1-B11
tagaccccactggctaccttggtgcggcattttcaacagcacagaatcaccctttacacgatcaaacgatgctgtttcatctaatgaccctgttgaacaggggggctcttataaatggtcacaatttcatggttcgaaattttcgatgtgggcaaccactacaggatcaagtacagctgaagggccgtgacctcctcactctacagaactttacaggagaagaaattaagtatatgctatggctatcaacacatctgaaattcaggatacaccacattcgacagtatttgcctttactgcacgggaagtccttatgcatgacttt

SEQ ID NO: 10512 - DNA, 404 bp, Triticum aestivum
  Clone ID: LIB31-014-Q1-E1-B12
catgtcagttggaaacatacgaaataatatgtagagttgaaatctgcaaattgcagacattaccaatcatcagattaagattacttctacactgcgtaactttgggttgacaatgagcctaattaagggcatgatattcaggcactttgaaaccgtgggtcacatgtgacaccatctggagaatgagatatactcaggcggggcttcctggatgattctttcatagacaaatcctcaaatgacttgtatctttggatttttatcatttgccctctactcgtcccttttcacccatcagcgctcccccactcgcacacctgggaagatgcaatgcctgtggctgaagcaacagttgtgcaaacctgagaacaagggacatgtattgctaagcagactgaaggagt

SEQ ID NO: 10513 - DNA, 331 bp, Triticum aestivum
  Clone ID: LIB31-014-Q1-E1-B9
tcaagtagaccccactggctaacttggtgcggcattttcaacagcacagaatcaacctttacacgatcaaaagatgctgtttcatccaaggaccctgttgaacaggggagctcttagaaatggtcacaatttcgtgggtcgaaattttccatgtgggcaaccactacacgataaagtacagctgaagggccgtgacctcctcactctgaatcaactttacacgagaacaaattaagtatatgccatggctatcagcacatctgaaattcacgataaaacacaaaggaaagtcattgcctttactgcaatggaagtccttaagcatgatttt

SEQ ID NO: 10514 - DNA, 200 bp, Triticum aestivum
  Clone ID: LIB31-014-Q1-E1-C10
aacagacaagtacgaatctcaagatgattcctcataacacgaatcagtacgtacttcgtacatcaagttccctaggtgtcaagaaattccattctgggaggcaagttcgtcaatcaaatttgtttagaagtccaacacaattagaccatctaaacaagccgcacagttggctcaaatactaatgttctagtaccagaatt

SEQ ID NO: 10515 - DNA, 378 bp, Triticum aestivum
  Clone ID: LIB31-014-Q1-E1-C9
tgcccagcttcctggtggatctcatggtgtactggacaaaccccaggcctgcgaaggccctgtaacccaagactggggtgcattgtagggggtagttgcgtacagaatggggataggatgcatcgggggacggaaatatagtggagaatggagttttcatgtcaccaggacacctttccatctcactcccatctcctccccagtctccttttgggacattacgtacgactcgaggatacaaggaaaaaccatgttttgtactgagaaactgagatcagtagctcctacctggtgtcctgttccttcagtcagcctctcaaggctctgagccctaatgccctcctgcaaccctgaggaatccatacttaaggggacggt

SEQ ID NO: 10516 - DNA, 444 bp, Triticum aestivum
  unsure at all n locations
  Clone ID: LIB31-014-Q1-E1-D10
ttcccgggtccacatgctcccgtgnagaggtgtctgtaggatgatgagttcgcctgcttaacactcaccacaggatacgaacggaatcatctcacactgtgaacgagatgcatgctgatccttcacagtcgcgactctctccatgtgaggtagaacgagcaccatgcatgttcatacaaaggcttcctgtcatactagtagcccgtggacgtggacgaatgtaccttgcagctcagctcactctaggaggaccccccggccgggtgccatcacctgtgccacaactacatcggcggctatttctgctcctgccgtccaggctatgagctccagccggatgggcgttcctgccaggccgaatgcagcagcgatctgttcacggagccctcatgctacatctccagcttggagtacccccggccctaaccccctgacctgccctgc

SEQ ID NO: 10517 - DNA, 375 bp, Triticum aestivum
  Clone ID: LIB31-014-Q1-E1-D9
attcgcgggtcgacttccaacaaagcgatatccatcatctcatcgatagacgggacaccctcgcctctatcacgtggtatcagatttccaggttgctcggtgagattttacagttttttagtactttagatcgagtccgttcttcataccgatagtccacgaggatgtcatgtagcgaagtttatggttagttcaccatcgcagaagcacgctgagctttgcttgatctatccagggttgtgctttgtgcaccttgaggttgcagcatcctgtctacttgcaggtcttacagtcgaatctctaacatcttcgagtactgcttgtaagttaccacgcagctggagcaccatcatctacgaggcttccatagactct

SEQ ID NO: 10518 - DNA, 352 bp, Triticum aestivum
  Clone ID: LIB31-014-Q1-E1-E9
acggtactacattcccgggtccacgctgtgagtcgaagttctgttgcacaggcggtgaagcctgcttctgagttatgacctctgtcggacgtttatccaagacagggttacagtgtgtataggcccgagtgggcaggagtcattcggtgctagttgaccttcgtcgacgtgcagtcgaagttccatcacgacacctgcaattacgatacctagcacgccttcgtcgttcatgactaggactaccacacctggtatgctgccggattcctgagcttttacccgtgcagtactgttcctgactcttctgtgtatatgaacgtgaccaccattctggactgggttcggaacatca

SEQ ID NO: 10519 - DNA, 431 bp, Triticum aestivum
  Clone ID: LIB31-014-Q1-E1-F10
cacgcgtccgaacaaatacattctcttttgctgtctctcatatagggttatcattaccatctttctaaattccatatatatgcgttagtatactgtagtggtgtttttctttctggcttacttcagtctgtataatatgctccagtttcatccaccgcattagaactgattcaaatgtattctttttaatggctgagtaatattccattgtgtatatgtaccacagtgttcttatccattcatctgctgatgaacgtctaggttgcttccatgtcctgactattataaacagtgctgcgatgaacattggggtacatgtgtctctttcaattctggtttcctcagtgtgtatgcccagcagtggggttgctgggtcactagtttactataccaaattggttaagaaaaaatatttagctagttgaactctt

SEQ ID NO: 10520 - DNA, 414 bp, Triticum aestivum
  Clone ID: LIB31-014-Q1-E1-F9
gcgtctggaggctcttgttgtctgggttctgctccagggtccactgcctcgcagagaaggtgaccccataagaacagcacagagggacgtctgtggatggccactcattagcctccagcaggggggacttcgccttcagcctctacaagcacttggctttgaatgaccccagtaagaatgtcatcttctcacctctgagcatctccatagccttggccttcctgtccctgagggctcatgaccacactgtgacagagatcctggaaggtctcaagttcaacctcacagagaccgccgagacagaaatcgaccagggcttccagcagctcctgcagacgttcaatcagcccagcaatcagctgcagctgagcgtgggcatcgccatgtttgtgtcagatgagctgaagctgctgg

SEQ ID NO: 10521 - DNA, 413 bp, Triticum aestivum
  Clone ID: LIB31-014-Q1-E1-G10
cactcctcacaagtaactgatacagacttcagtcaggatctcatagccaggatatgctccacatctgataagttttctcacgattagttagggtatcatgctcagatgtgcaccgtcttatttgtggctggaactctcgtgatttatgctgtctggcatgctcttattgttgttttatgtccagcttctgaaccgcatggactgtcagtgagatcattaattgaggctttacacccttccagtcattcggcacctccactgagagtaacgttgtagtccagctgatgatgggagtgatttgcctgtgattgttattggccagcatatgtctgttgtaccgaccgtagtcacggaggatgactgcgaagataccgtgtgatcaggtccgacccgttggtcgccataggatgggg

SEQ ID NO: 10522 - DNA, 405 bp, Triticum aestivum
  Clone ID: LIB31-014-Q1-E1-G9
gactaggaattctatgcacttatgattggaactattagcaagcatccgcaactactaatgttcattaaggtaaaacccaaccatagcattaagatatattggtcccccttcaatcccgtatgcatcaatttctatgctaggttgaagcttctgttacacttgccctccaatacatactcctatcatcatacaactaaccctatggtgtgatacatgcgcgcattcatatgatgggaaccaaaggacaacaacatatccacatgcaaattaaatcaatcatagcaattcatcaaccaccgataggacaacgacattctactcagacatcatacgatggcaacacaccattggataacaacatgaagcacaaagcccaatgtccacgtagagggtactacgggttgc

SEQ ID NO: 10523 - DNA, 217 bp, Triticum aestivum
  Clone ID: LIB31-014-Q1-E1-H10
gacctcaaggaagaaaagaagaagatatcggctgctgtcaagaaaatgtatgatattcaggctaagaatgttaagatcctcatcaggcctgatggcacgaagaaggcgtatctgaagcatgacaccagcctacgatgctcatgacttggcatcaccgttggggatcatcttaccctgagggagggtcctgtcatatctgcttgagctcgtggtgaca

SEQ ID NO: 10524 - DNA, 455 bp, Triticum aestivum
  Clone ID: LIB31-014-Q1-E1-H12
ctcgcgggtcgacgctcttctggaaagagactcatatcagtaagacaacccaagaatggcgagatgctcttatccgtgcacgggtcacctcttggaatgtacaaagaggaaaatctggcagctattaccgaatctggaaacggaagcgaagagccgcctcacgatgccagtggccatcaatagtagtagtagagcttaaccggccctcaacataaaaggctaggaatttgatgctgcatcttctcttcaggccgaagctgggacaccaatcgaagctccaaccaccaattcagtgtgcttgcagcagcatctcgagtcccagcgtcagctgagagtctccgacaagatgcagtgcgtgtgtaggctatcatgtttgatataagatcttatcatgtttgatgtgttgcaagtgcaagcatctgagtcatgtttttgtttgctataaatcataccat

SEQ ID NO: 10525 - DNA, 438 bp, Triticum aestivum
  Clone ID: LIB31-014-Q1-E1-H9
actacactcgagaaaatctcgtctttcctggagccaccaccgatggacgtgcgaacgagttccagcaccccactgataggcccagggcccccctgcatcttctccaccgccgcccaccggtgcggggtcggtggcctaccggctgcagtgatcagcatcccaaccctgctctcctcgtcgtctctcctgatcatcagcttcatcttatggaaaacttgccgccggttgtcccgggtcacccatccccgcctgccatccacatgaggggcccaggaatctgaattgtggaatgtgacacccacaaatggcgctgagttatattaatgcctgcgaacctctgctgctgaggcccctggagctaccctgctcctttcaaagacccattcatcaataatccttttgattctgaaagtccttgcaatcaagtccccagacttt

SEQ ID NO: 10526 - DNA, 437 bp, Triticum aestivum
  Clone ID: LIB31-015-Q1-E1-A3
gtccaccatacattacaaagggggcagcagagccttgtcacatgggccaccccaagactgagtgaagataaggttaggcaatgtgttgactcaagacttggaggggactatcctcctaaggctgttgcaaagtttgcagccgtcgctgcattgtgcgtccaatacgaagccgacttccggccaaacatgagcatcgtcgtcaaggcgctccagcccctgctgaacgcgcgagcagcccaccccggggctgaacacgctggacgctaagctgcactccggccttttgtatgatataatagataaggaaaaatgagccatcaattgttgttcttgcggggcatgtggcaagcggtttttgtacatttgtgattattcttcccaagttgtaaccctcgagattctagtaccagaaatatttgattccttgtatcggttgc

SEQ ID NO: 10527 - DNA, 439 bp, Triticum aestivum
  Clone ID: LIB31-015-Q1-E1-A4
tccacaagccgatcctaaacactgactccggcataggtattcctatgctctgctctgctctctctctctctctctaatgccactgggccgtgttactgtccactcgacgtataactgatgcttcaaatgttaggcatgatataagtaaatcctgtttcctttgaagagatagattttcacatgaaggatggcattacggcagtaggaacactctcttgtgttgtttgatgtaacatgtcgggtttccactggcattatacatatttggggctggcgagcaaatttatggtgaacaatttttgtatacacctttacccagctagcaaaaaaataatcttttccatttagtattcctatgtcaacacaaccatgagtgtaacttcttttggaaatgatgttatttactacaatgctaccctcccatctcctcggattgggg

SEQ ID NO: 10528 - DNA, 413 bp, Triticum aestivum
  Clone ID: LIB31-015-Q1-E1-A5
ccgtaatcgtgaacgtcaacggcgcaacgactcgaaacgcgtctcccgctggactcgctccacgtacgccatctcgtctcgtttatcatcgtctcgccgcgtaccggtttgccccaacgaacgtccctctctccaccaatccaatattcgaaaccgctcgagaaagaaagcaccatgcaagatcgagatagcctctgtccttgcttgagccaacgtacggagccgcgtaaggaggaaggaactgcgaaactgtagtatctgccttcctaatgggcccagcaggtctcccatccgatctgcccatataagttgagcacccgagccttttcggcccatcgtcgtcgcctgtcccagttcccctgttcaatactgcgaaactgttgtatgcagtgctgtgcccgttgtacatctac

SEQ ID NO: 10529 - DNA, 430 bp, Triticum aestivum
  Clone ID: LIB31-015-Q1-E1-B1
ggtcgacgagattgtcaatctaggccccgtatttctacacaatatgttcccctttgagaggttcatgcgagtcctaaagaaatatgtccgtaaccgtgctaggccagaaggaagcatctccacgggccatcaaatagaggatgtcattgggttttgtgttgacttcattcctggccttaagaagattagtctccctaaatcgtggtatgaggggagactaactagaaaaggcccgctaggaggggactcaataatatgcaaggacgggcattcttgttctcaagcacactacacagttctacagaactctaccttggtgacctcgtatgtcgatgaacacaagaacagtctatgctccaaacacccgaagcagtgtgatgattggattacatgtcaacacatcaggactttcggcagttggttgggaaca

SEQ ID NO: 10530 - DNA, 416 bp, Triticum aestivum
  Clone ID: LIB31-015-Q1-E1-B4
tccacgtacctcgctcaacattgaatgactttggttctgtccaaacatgagctgtatgaaaatgacataacacagaagaatcatgcctaagtaaaaagatatatgaaagaactaaaacgtaagcgcatcatgtatagggagtacgaagaaaaaagatgaaaatgttaaaaaaagaacaaagcaaaatgagtgattatagggtgtggtcatttacgctttcaactccttcatgtgcttgctgctggccctcgcatttccaaaccgcttgatgatgtcgtacagctgggtctgttccttagtggccctgaattcgggctcgtagtcttccgcgggaggtgcgtgaactaccctctgctgtctcacagaaccaagggtcgcgcttctgatggtatcctcagttgccgtctccgcagtca

SEQ ID NO: 10531 - DNA, 384 bp, Triticum aestivum
  Clone ID: LIB31-015-Q1-E1-C1
tcgacagtgcggcctaaattcactcctattaaggctgtcttcttcgggtctgttgggtggacctgaaatttgaccgtttcttctgctggcttgaaagaagtagatttgggtcatttgtccaggataacatcgtctctatccaccctggagcgtagtgcggttagttcttcagccgcaagggccttagataatgcctcgagggccaaggatgcggttttgttctcggtgcggagtgctatgtccggatcgctgacgagggtgattattccattaggcccgggcatttttagctacatatacccataatgaggtatggcttgaaagcgcatgaaggcctctcgccctaacagggcatggtatcccaaaaaaaagggagagcggggg

SEQ ID NO: 10532 - DNA, 440 bp, Triticum aestivum
  unsure at all n locations
  Clone ID: LIB31-015-Q1-E1-C2
gtcgacgagggcccccagacaggccattcccactgcacctcgcaggacagctcttacttcgccacaggctccagcagcggcatcgtgaacgtgtacaagagggacgagttcctcggggggaagaggaagccgctgaagacgatcgagaacctcacgaccgagacgggccagatgaagttcaaccatgacgcccagatcctggcgataagctcgggcaaggatangaatgggatgaggctcgtacacgtcccatccttcaccgtgtaccaaaactggccagggccacggttcagccttcagtacccgaggtgcctggacttcagccctgggagcgggttcctctccgtcgggcacgccggcggaaaagttttgctctacaagctgcaccactatcagaacgcttagggctcccacagtccagttttgacactgtatttttc

SEQ ID NO: 10533 - DNA, 415 bp, Triticum aestivum
  Clone ID: LIB31-015-Q1-E1-D1
tcgacatcacgagcgaacgacggtactaacactgagctggagctgaagttatctgctgcctcggaggagctacagttccttaggtcaaaactgacactcatggagagatatgccaacatactccacatttcaatattccgcaagcccatggacgaacggacacttcctcgctcacttcaagagtctgcagtctttgatatcagaaaggaatttgagaacatcttggattcgtcggatactgatgagctcgctcgcttggagatgttttaccgtagcgtgctttctggtgttaaggacaagcttctcaagagaaaagttgaagtgatggtccaagaatgcattgtttcactctctgcagggaggcaaaccccgcgtggtcagtgagttggaagaccgttgttataaactgcatttt

SEQ ID NO: 10534 - DNA, 410 bp, Triticum aestivum
  Clone ID: LIB31-015-Q1-E1-D2
tgccacatcatctttcaagcatagcgtccgtgacgaatggctcgccagacacctcggccaaaataagccgagaacgatggccgcattaacaaacctcatgacccgcttttgcgcgggggaggacagctggctatccagatgcagcaccagcgaccccagtacatctgaagttagagatggaaacgggaaatcacggcgcaacagcaataacaaacgccggaataaagaagacagaacgaagggcacggcagtaaatgccggattcaaaagctctcagccaggccaaaagccgccccctaaaggcaccagggacgaattgtccagcccctggtaaacttgctaatcatacccagtagataatgttgggtcttcaagcagtccggcaaactcaacgccggtcgacaaggggg

SEQ ID NO: 10535 - DNA, 388 bp, Triticum aestivum
  Clone ID: LIB31-015-Q1-E1-D3
gcgttgatgcgaaatccatcatctttcaaggtctggttgaccggaacagagcccacagagagggtaatgacagagatgtacccatcagcagcggagtgcatgtctccggaccagagtgtttcagcagagccatcagggccgcggtgattcctcccaacttcaggttggtgactggagtcagcaagttcaacggtgagtctaagcccgatacttggcttgaggactaccgagtggctattcagatcgacgatggaaatgacgaggtggccatgaagcatctgcctctcatgttggaagggtcaaccagagcatggttgaatcagttgacacccagcagcatctacacatgggacgacctctcctgagtgtttgtcaggacgttcgaagg

SEQ ID NO: 10536 - DNA, 435 bp, Triticum aestivum
  Clone ID: LIB31-015-Q1-E1-D4
ctcgcctagggtatctggaaaattggggtatttatagagcaaagaggcggttcggggggcacccgaggtgggcacaacccaccagggcgcgcctgggcctcctagcgtgcctggtgggttgtgctcccatcggagcaccccccatgtgttgccttggcccattgggtgtcttctggtccataaaaaatctccgtgaagtttgttgcatttggactccgtttggtattgatttcctgcgatgtaaaaaacatgcagaaaacagtaactggcacttggcactatgttaataggttagtaccaaaaatgatataaaatgactataaatgattataaaacatccaagattgatagtataacaacatggaacaatcaaaaattatagactcgttggggacgtatcagcatccccaagcttaactcctggtcgtcctcgag

SEQ ID NO: 10537 - DNA, 370 bp, Triticum aestivum
  Clone ID: LIB31-015-Q1-E1-D7
ggaacgagcacataagttgcagcacacaagtcgctgatgccctcctctggttcctctgctccttgtccagatcgatcctgccgccagcgatggaaagatgctgctccgccgctgcctgatcttccgctctctctctcccccctggtccaaatccctaatttttccccaaggattcaaccccaaactttctaatcccctctcagatttgtcgtgggctgctcttcctctgctgctccagattgaactcgccggcgctgatgaccgcggtgccgctgggtggtgcaggttaacgctcaagtgtgcagccatggagcagatcgagcatatgtgcaggtagagagatgaagacggtggggaagacaagctgttg

SEQ ID NO: 10538 - DNA, 441 bp, Triticum aestivum
  Clone ID: LIB31-015-Q1-E1-E1
ggtcgacttccaccacacgatagccaccatctcatcgaaagacgagacacgtttgcctctatcaagtggtatcagatttccaggttgctcagtgagattttacagttttgcgtagtttagatcgagtctattcttcatacctacagttcacaaaaaagccaaaaaaattagggttagttcatcatatctgaaccaatctaagcctttgcataatctttttagggttttgcattgttgaatttgcggttgcatcgtcgtgtctagttgctggtcttagtgtctagtcctttagagtttcgagttctgtccacaagttttcacgccgctactgcaccatcgtcatcaccgctgccatataccaccatcgtcgtcatcgctgccatataccaccatcgtcatcacgctcccatataccaccatcctcatcaccactgccatata

SEQ ID NO: 10539 - DNA, 431 bp, Triticum aestivum
  Clone ID: LIB31-015-Q1-E1-E2
tcgacaagtcgggagaaaatgatcatcatcttcaccaccaactacaaggagcgtctcgacccggcacttctgcggcctggcaggatggacatgcacatccacatggggtactgcaccacggaggctttccgaattcttgccaacaactaccattccatcgactaccatgccacctatccagagatcgagaagctgatcgaggaggttgccgaggtcctgatgaggaacgacgacactgatgttgcgctgcatgatcttgtcgagctcataaagttaaagaagaaggatgcgactgagatcaaaactgaaagtaagaagacagagaagaaagatgccactgatgacatcaagattgaggctacgcacgtggatgggaagaaagatggtggtgagatcaagactggaagtgtgcaggtggaggagaagaaaga

SEQ ID NO: 10540 - DNA, 373 bp, Triticum aestivum
  Clone ID: LIB31-015-Q1-E1-E3
tatcacatcgaaacatcgggacacctttgcctctatcaattggtatcagattttcaggttgctcggtgagattttacagtttttcgtcgtttagatcgagtctattctttgtacctatagtccactaaaaagccaagaaaaattagggtttgttcatcctatccgaactgatctgaacctttgcataatcttttctgtatttgctttgttgaatttgcggttgcatcgtcgtgtcaagttgctggtcttagtgtctagtcctttagagttttgagttcagttcacaggttgtcatgtcgctgctgccatatatcaccatcgcatcatcatcatcgctgctgccatataccaccaccacaccaacttcatcgtg

SEQ ID NO: 10541 - DNA, 439 bp, Triticum aestivum
  Clone ID: LIB31-015-Q1-E1-F2
gtccacgaggccttcctagctaagtatgatgtcaagccgaacaatgccattctcgccgaggacaagcacttgcccatgtacgatgagttgtccagcaaggaaaatgttgaatacattgctggaggagccacgcagaactctatcagggttgcccaatggatgcttcaaactcctggtgcaacaagttacatgggttgcattggaaaggacaagtatggtgaggagatgaagagcgccgctaaagctgcaggagttactgctcattactatgaggatgaggctgctcctacaggcacatgtgctgtatgtgttgttggtggcgaaaggtcattgattgcaaacttatctgccgcgaactgctacaaatctgagcatctaaagaagccagagaactgggcactagtttagaaagcaagatacatctaaattgctggctttt

SEQ ID NO: 10542 - DNA, 432 bp, Triticum aestivum
  Clone ID: LIB31-015-Q1-E1-F5
cgggtcgacaaaaatatgcaatagacgataatacattggtaaaaagcagcgctaatttttaagaactaaccacagcgccagatatgaataccttttcaaaaaaatgaacacttttcttgcaaagtgtaaagaaataattaaaaggcaagtattttttgaaagtctgaacattttgtgctagatgtgagcaaattccgaaattttaaacttttctgaaatgcgatttgtcaaaaatgttaacatcttttggagttctgaatttttttttaaaagtgtgaacttaacaacatgaacaaatattgaaatttcaaacttcttcccaaaatggcgaacaatttttgtagaaagtgaccattttttgaaactgtgaatttcttgaaaattctgaactttccgttcaaataatgaaaaatccaaaaaattctgaacaaa

SEQ ID NO: 10543 - DNA, 437 bp, Triticum aestivum
  Clone ID: LIB31-015-Q1-E1-G2
ttcgacattacactctagaatgactcgtatcaccacccatggagcttcctcctttccgtcttcaggtgagttcgccccctcctctctctgctcttgttcgtggccattgaggcattgttcttggttaggatttaccactgtttgggctcaattggctactgtttgaggtcaattttgtgtatactattaagtgttgattgtttcttgaattgaacagcaaggttagacatgaatttgttagtagaatagatccctgaccgaactgcaattgttagttgaattgtccaatcttgaatttagggagctgctactgaaaggtttttttcattttgtatgtcatgggttggccatcaattttattaaacagcaaggttaaccacgatcacacgaagccgaaggtgcacgatgaagaaaccgtacgtgcatactctatccat

SEQ ID NO: 10544 - DNA, 441 bp, Triticum aestivum
  Clone ID: LIB31-015-Q1-E1-G3
ggtccaccagcactggtcaactgatacacaagcttggaggtattgacaagcgtgtgatcgagaggttcgagaaggaagccgctgagatgaacaagcggtcgttcaagtacgcctgggtgcttgacaagctgaaggccgagcgtgagaggggtatcaccattgatattgccctgtggaagttcgagaccaccaagtactactgcaccgtcattgatgcccctggtcaccgtgacttcatcaagaacatgattactggtacctcccaggctgactgtgctgtgctcatcattgactccaccactggtggttttgaggctggtatctccaaggatggccagacccgtgagcacgccctccttgctttcactcttggagtgaagcagatgatctgctgctgcaacaagatggatgccaccactcctaagtactccaaggctcgtt

SEQ ID NO: 10545 - DNA, 355 bp, Triticum aestivum
  Clone ID: LIB31-015-Q1-E1-G4
gtccaccagcccccgccagtccatcaccgccgcgaacccaagaactgaaccatggcgaagatcaagccaaaggcattgctggcacagagcaaacagaacaagggccctacccagatcggcctgttgaggatcatgacctacatcgtcctcggcgccctagcagtgtcctccgtttactatgcctatcagtactggcagagcaaaggaccggccgttgcggcagcagcagcataatgcgccgtgggaaactaaagccccaggaatgtacttgattttgctgctgttgttgtagtgtcatgtcgtttttttctggtgttcgcagtccggtaaatttgtgaaacattgacagagcatg

SEQ ID NO: 10546 - DNA, 440 bp, Triticum aestivum
  Clone ID: LIB31-015-Q1-E1-H1
ggtcgacagcacacactatgacccaatcttaatcagaaaattactcatatatccaacatatcgtccatcactcatgtcgagcccaaatgtggcaccgcatcatgtccatggctacttggcccgggtcggtgcgggcgagggagcctgccgacgtcggtggaggcttaaaaccttgcagtcaccctcgccataatagccgatgtccgaagcagagtgaccatagttgggaggcgcctggatggcatcagcttcaccaattatgttctcctcaacatgctctagctccaaactagcaccaacacccatagaaacctgaatggcagccatgtaacatagaaactgtatggatctcgatgacataggcaaatggaatccaaatgtaaaattcattttaaaatatgaatattgtggaaaatgtacacatgtctgagaaacaacgt

SEQ ID NO: 10547 - DNA, 439 bp, Triticum aestivum
  Clone ID: LIB31-016-Q1-E1-B6
ctcgcgggtcgacgacatgctgtacatcgagtcatgggacaggaacaggagcctcctcatcggctatgcatgtctcttccagagacactgaattcaccggcgcggcgcctccactggaggcagagttattgatgcctttctggctgctgccgtctgaaaaccccattatgcttctagccttacgctcaacccacttcaggctcaccctgataaaatttgtaagatcaactcggtacctcttggcatcagttgagctgccaccgcaggagattccatctccctcctcaccgcgttgctgcaggcttagcttctctgcaactggttttgcaggttcatcagggcccttgttctttctagcctgcagtctgttttcctcggaagaatcacccagcaaggcccttggtctcttccgtggaggagcagattttgcagattcatg

SEQ ID NO: 10548 - DNA, 429 bp, Triticum aestivum
  Clone ID: LIB31-016-Q1-E1-E2
tcgtgggtcgacatcagtcgcgtaaaatgagtcatcttatccatgtcgggtggccgtctgtctgggtcaggatcgcgacccagtgggcaacagcaggtctgttcatctggtcccttgttgctcccctcctgttcccagacagggagttctagatcgacctggttacctgctagtgcatacctgctagtgcatcatctgattggagccacctacgtattgtatcgtatcgaacgtgttttggctgtgatggctaagctgactatctgtattctggtctgtaatattgtgtaagcaaacccatggcaaggagccggtgtttgtgtgacgttgtcgagtctggtctgcataatgtgtgacctaacgcattgttgccagtatttcaacagtgaagatacggtctttggttgtatatatattgaagttgatcaa

SEQ ID NO: 10549 - DNA, 432 bp, Triticum aestivum
  Clone ID: LIB31-016-Q1-E1-E5
gggtcgactccgaccagtacaccgtgccccaggggaagcgcgccatcgagcttctctccggcaaggagggcatcatctcgcagatggtggagacgacccctcagaaggcgtacaccctgacgttcacgctgggctcggcaggcgactcgtgccagctgccaatggctgtcatggcattcgccggcgaccaggcccagaacttccactactcccccatgggcaacgccacgagccaggccgtgaacgtgaacttcacggcgcgcgccgagaggacacgcgttgcgctctacagcgtctactacaacacgagaagcgacgaccacagctcgctctgcgggccggtgatagacgacgtccgtgtctggggcttgaatggggctgctgggttgaaggcaagtattgcgctgcttattgccatggctagtgtcatcg

SEQ ID NO: 10550 - DNA, 291 bp, Triticum aestivum
  Clone ID: LIB31-016-Q1-E1-F3
cgcacaggtccgagactcgcgggtcgacatcatgggtgaaagttactccaagtactgctggtatcagcagtacggacattgatggggctgagtacaagttgctggggaggtggaatgcacttcaggtatgtcatgtgtacctgcaagtgaaaatgcccgggtttcagactgtgaatgttgctggttcggcttaacatacaaactggctgtccattgtattttaaacatcagtacatcacaaattcactatgttatagtgctcttcttacatttgcagatatcaagttggtg

SEQ ID NO: 10551 - DNA, 396 bp, Triticum aestivum
  Clone ID: LIB31-016-Q1-E1-F6
aggtagaaccaacacaacagaacaacaaccgttgtcgatgaagagtagtgtagatcagaaaaaatccaacctgaagacacgagaacatagacgaacgatgaacagatgcgagcaaatccaccgtagacagatctgccggagacacgtcctcacacgcccaccggcgatggaagcaccaccgaaacggggcctagaggggagaaccttattccatttttagggagccgccaccgcctcgtcttccttagcaggacagaaaccctaacaaaactcgaagaaagatctaaaaacggagccctcccaccagcaggaaccatgatccactctgttcccatgactctacggccgcaggagacgaggcagaccaccgacgggaggcatagaaaccctagcttt

SEQ ID NO: 10552 - DNA, 431 bp, Triticum aestivum
  Clone ID: LIB31-016-Q1-E1-F7
acaggtacagaactcgcgggtcgacattcgggtgtatggtgtgcctaaggagggttagcaactgtagggagctcctatcgtcttgtctattattaagtgctgtaagcgtcagttcgcgccgctgggcttgaactcctggcgtcgcacaagcgttaaccactggaccaagctcagtttgttgattacttgaggaaaacagagcgctttgacctttcattcggtacaaacactagacatatgctagtattatatatccaccatagattatttgaataaagaaaacataaatttgaaaaagcattcacatataccatgaattgaacagaaaagtttgcaaaaaatggaaaaaaattcaagaaccccaatagaattcaatcaaatttgacaagagttcaccaaatttgagaaactttcatctaagttttacaaag

SEQ ID NO: 10553 - DNA, 221 bp, Triticum aestivum
  Clone ID: LIB31-016-Q1-E1-H1
acaggaccgagactcgcgggtcgacacagaaccataaacttctgctcaataacattttagtactcacactttttgctgatgacttcagatctgaacctaacggtaaaagtgccgaccttaaaatgaaccgccaaatgcctaaaccaaaataagaacaactgggaagccagtccgttgccacaaggggctttaaaccaatttttaagacaccttcaacaacc

SEQ ID NO: 10554 - DNA, 322 bp, Triticum aestivum
  Clone ID: LIB31-016-Q1-E1-H2
gggtcgacacgattatcaacagaggtggcgaaccaaaccgtcgaagctcgttgatggctcctacagtgttcggaacgaatgaatcttctgtatgtatctacatatcacaccaaaaggttaccgaataagatgtgtgattggctttcgccgtgtacccataccagcatcgattctgtatcacttgtgtggtagtttgcacaaaacctgcttgaaaatgtttcatggaaacttctttgcctggcgatgatgcctgtattgaataataaatgattcagtgtcacaaaaaacaaaaaaacagggttaaaaaaaaagcggccgctct

SEQ ID NO: 10555 - DNA, 415 bp, Triticum aestivum
  unsure at all n locations
  Clone ID: LIB31-016-Q1-E1-H4
gggtcgccagaatcccgcaaaatcagtcggagaaacctcgacacgccctccaacgatggtagaagcactatcggaacggggtagaacgtgggaaacattattcctactaagggatgtcgccgccgccacacagtcccaaccaaaacgctgaacctaacaagaacgagaacaaggtccctcccgctggcgtggggccgagatcctccacacctccacggcctataggccatcaaagatgtggcaaactggcggcggcgccgatgggaggagaagtgtttttcttgtcaaggaaaaaaatggcataaaagctccaatttgacacatgtatctgcactacttaatcattcatagttgttgggcctacaaataagaggtanggctgacattttgcaaaactgccctatagtaacccggg

SEQ ID NO: 10556 - DNA, 358 bp, Triticum aestivum
  Clone ID: LIB31-017-Q1-E1-A1
gtcgacatcacgggcttactggagtccgtcccagttttggtcgtcgaacgatgacgatacccttcatactatgtgtaaatgcccctggcgacgaacctgtggcatgcaatggccaaagattggcctagccctgatgtggattttgttcacaacaatggccctgaatggatgttctcctgctctagccactcacagatacgccacgcgtggtgttgctgaccatgtgacgtacttggcacgtccgtaacgagataactcgtcagaagaatccgccccctacaaaggcctcctgcagacttctccattgatatattaattccctgatatataaacggcaacagcctatcgctgatattgt

SEQ ID NO: 10557 - DNA, 347 bp, Triticum aestivum
  Clone ID: LIB31-017-Q1-E1-A2
gggtcgacaagattatcaacagaggtgggaaccaaactgttgaagctcgttgatggcttctacagtgttcggcagcgagcggagtcttctgtatgcatctacatatcacaccaaaagttaccgaataagatgtgtgtgattggctttcgccgtgtactcgtaccagcatcgatcatgtatcagttgtgtggttagtttgcgccatacccgctcgaaaatctttgctgaaacttcttcgcctggcgatgatgcctacattgaataataatgatccagtgtcagcaacggtgtaacgaaaacagatgcatgttcgtctaaatctgtgggaaatgttgcgtgataattgc

SEQ ID NO: 10558 - DNA, 366 bp, Triticum aestivum
  Clone ID: LIB31-017-Q1-E1-A5
ctcgcgggtcgacgcacaacgcaacattcagtacgtaggatccttctcttgggagccagggacaggtggagaacgggaaggcgccatgggaaggggtgcgggagcgctgccggaaagagtgggggatcttccagacgaggatcgcggaggccgacaaggcgtattacgagatgatgggcgtcacccctcccaacgtaacatctgtccactaggccgtcgtatacatcacagctgttaatcctccctgtcccccttttttgtcatctctagagcccttattgtagtgagcttaggtgaatggtgatgatattgatgatacgtgtagagcatacacacatatcataccatatcagattaattctgtta

SEQ ID NO: 10559 - DNA, 443 bp, Triticum aestivum
  Clone ID: LIB31-017-Q1-E1-B1
gggtcgacccaagtccatattctggtacttcctcaggaagctcaagaaggtgaagaaggccaacggccagatgctcgccatcaacgagatctttgagaagaaccccaccaccatcaagaactacggcatctggctgcgctaccagagcaggaccggttaccacaacatgtacaaggagtaccgcgacacgaccctgaacggcggcgtggagcagatgtacacggagatggcgtcgcggcaccacgtgcgtgccccctgcatccagatcatcaagactgcgacggtggacttcaagctgtgcaagagggacaacacgaagcagttccacaactccaagatcaagttcccgctggtgtaccagaaggtgcgcccacccacccgcaagctcaagaccacctacaaggcgacgaggcccaacctgttcatgtgatcgggtccctact

SEQ ID NO: 10560 - DNA, 441 bp, Triticum aestivum
  Clone ID: LIB31-017-Q1-E1-B3
gtcgacaaggccatcctcgccctcaagacgcagcgccgcaagctcgcgcagttccagcagcagcttgagaaggtgatcgaagcagaaaaggaagctgcacgccagttggttcagcaaaagaagagagacagagctttgattgcactgaagaagaagaaatcccaggaagagctcctgaaacaagttgatacatggcaaatgaatgtcgaacagcagctggcagatattgaactagcaagcaagcaaaaagctgtattggaaagcctaaagactggaaatgctgcccttaagtctatacagagtgagattaacatcgacgatgtccaaaagttaatggatgacacagctgagaccaaggcttatcaggatgaaataaatgccgctctgggtgaacaactatctgctgaggattaggaggctgtcatgggtgaatttgacaac

SEQ ID NO: 10561 - DNA, 434 bp, Triticum aestivum
  Clone ID: LIB31-017-Q1-E1-B6
actcgcgggtcgacgcgacgcgataaagtgtgcctcgcgatgctcgtgggggcagagctcgacggcctcaccaacctgcagccccgcggcggctgcgacgaccccagctacccttactacttcaagtgcaagttatgttcgagggatggatcagttgtgatgattcctgggcagggaacaccactaactgctgagcagagccagaaaggagagatgacttgtttgatggtctttgaatgcagaggctatgaacctattgagttcgcttttggtaatggctggaaggctgaatctgtacatgggacaccatttgacattgatctttctgaaggagagtttgatgagtatgatgagaagggagagtgccctgtcgctctatccaagctgcagtcaacattcagagtgggtgaaaagcagggttttcatggggaaga

SEQ ID NO: 10562 - DNA, 441 bp, Triticum aestivum
  unsure at all n locations
  Clone ID: LIB31-017-Q1-E1-C2
cgagactcgagggtcgacgtatcacacgaaacttctgcccaataagtggatgacatctgtcccaacgatgagccgacacgtatttcctccagccaatgatgattttacacgtggaaaatccccattggtcggggctgttaacggtttatcggatccaaaacccgacccgatagcttaacgacgttccattacggtggatgccacgtgtcggtcacccttgacgaaatcacttttgtgacacgcgatttatcgtcatggaagtgcacacttctgtgatgataattttggtaaagtcatggaacacttctacgatagcacaggtatgactatcttgattctgtcataaaatcgtcatggatgtacatgcatgacanaaaaacgcgacctactgtgacaaacacgtatcatcacggaagtgtnattttttgtantgattgtccc

SEQ ID NO: 10563 - DNA, 446 bp, Triticum aestivum
  Clone ID: LIB31-017-Q1-E1-C3
attcaagggtcgactccttgtatggctggacatattgctagcctactccagtcatcgctacaatcggctgttacagcagtatgttactttcctatgatatcatgatggcttgcttatattactctcaacatttactgaaaaaatattcatgctcataacatgcttttcttaagattgactccaacttgatatgatgttgtaggcctcttggtgcccctacccttcctaatcccagaacctttcaaagtaaagtggcatggcagttgcaggtggttactggctcgatcagacaacggcgaacgattgatgatcgttctcacgtaccggacgtgttgtttcgcggaatacaatcatagtcactgcaaaggtctttgagcaggatcctagcttctttgggccttcaagaatttttgactggaggctggtaagtagccttggtacacgct

SEQ ID NO: 10564 - DNA, 400 bp, Triticum aestivum
  Clone ID: LIB31-017-Q1-E1-C7
gatgagaaagattggttgtcacttgttgcggtgcacagtgatgcctggttgctagcagtagccttctactttggagcaagattcgggtttgacaaagaatccaggaagcggctttttagcatgataaacaacctccccaccatatatgaggttgtcaccggaactgcgaagaagcaggtcaaagaaaaacaccccaaaagcagcagcaagataaataaatctggcactaagccatctcgccagccagaacctaactcaaggggtccaaagatgccaccacctccgaaggatgaggacgacagtggaggcgaggaagaagagggagaagaacatgaaaaggcattatgtggtgcgtgtaacgataactatggacaggatgaattctggatctgccgtgatg

SEQ ID NO: 10565 - DNA, 435 bp, Triticum aestivum
  Clone ID: LIB31-017-Q1-E1-D4
ggtcgacgccatccaccaaatacatacctataaaaacggttttgagaacattttagaaggttcctatccagtttttaccattttggggatcctcgtatatggtttttgactgttttttcattattttttcctttttttctttttagtttatattatgttaatttttttccaatatacaaaattttcaaattttcaaaagttatttggaattgtgaaacattgttaatgatttccaaaatgtttacaagtttcaaaaattgttttttggaattttaaaaagttcttatttttttcaaaaaacgaatagaacttgtaagaaaatttcttttagaaaaaaagaacaaaacctattcccaattttaaaaaagtgtttgaaattttcaaaaactgttgtggttttctataaatttattggaagtttaaaaagtacaaaat

SEQ ID NO: 10566 - DNA, 342 bp, Triticum aestivum
  Clone ID: LIB31-017-Q1-E1-E1
ggtcgacaattgaattcaaacccaatacagccaatgatccccatatgagaaagcccgatattaccaaggccaagcaactgctaggttgggagccaaaggtatctctgaaggaaggccttcccttgatggtgacagatttccgcaaaaggatcttggatgagtaatcaaggcaacagtgagatgaatctatttggttctgaatgctgcgaatataggcaaacgcgcttcaccaactggatccgttcagtacaattctgtgtttgtataacgaccttgtagaatcatttaaatttgttttcgtcttggtgagactggacagaagtaaccaatggttttttgtcc

SEQ ID NO: 10567 - DNA, 425 bp, Triticum aestivum
  Clone ID: LIB31-017-Q1-E1-E6
ttcccgggtccacatcgagccagaagcgcatgtcaagcaggcgatgaatgagattaatgcagctgcaaggatgagggtggctgcaaacgagaaggcggaggctgagaagattgtccagatcaagcgtgccgagggtgaagcagaggccaagtacctgtctggcctgggtatcgcccgccagcgccaggccattgtggatggcctgagggacagcgtcctgggcttctcagtcaatgcgcctggcaccactgcaaaggacgtgatggacatggtgctgatcacccagtactttgacactatgaaagaggttggcgcgtcctccaagtcctcggcggtgttcatcccccatggccctggcgcggtgcgcgacatcgccacgcagatccgcgaccgtcttcgtcaggggccagtctgcctctgacaac

SEQ ID NO: 10568 - DNA, 441 bp, Triticum aestivum
  Clone ID: LIB31-017-Q1-E1-F2
attcgagggtcgactctcacagaaaacgatagccatcatctcatcgaaacatcggaagaccttagcctctatcaagtggtatcagatttccaggttgcacggtgagattttacagtttttcgtatattagatcgagtctgttcgtcatacctacaggcaacgataaagccacacaaaagattacggttagtgcatcatatccgaaccaatctgagcctttgcataatctttttagggtttttgcattgttgaatttgcggttgcatcgtcgtgtcaagttgatggtcttagagtcgagtcttttagagtttcgagttctggtcataaattgtcacgccgccgccgcaccatcatcatcgcccatctaccacttttgcatatccgccaacgctctgaatccatatctatataccaccacgaatccgtattcatatatcacca

SEQ ID NO: 10569 - DNA, 443 bp, Triticum aestivum
  Clone ID: LIB31-017-Q1-E1-F3
tccggaattctagggggccgcgaggtcgtcaagggcggcatcgagctcaaggactcggccaaggtcgcggatctgcaggaggccatccacgccaagactaagaagtattatcctgctaggcaacggctcaccctccctgcacagcctggaaaatctggaaagccagttgtcctcaatcaaaaggccagcctatcggaatactgcgagaagggttccgggtccctgacagtggtcttcaaagatttaggcccgcaggtctactacagcacgctcttcttctgggaatacgtcggccctcttatcatctaccccatcttctattacctgcccgtctacagatactttggatatgagggggagcgggtcatccaccccgtccagacgtacgccatgtactacttctgcttccactacttcaagaggatcatggagaccttcttcgt

SEQ ID NO: 10570 - DNA, 385 bp, Triticum aestivum
  Clone ID: LIB31-017-Q1-E1-G1
ttcacgggtccacatctactaaggaatcagcttaagtgggttcagccgccccaaatctgactcgatccagggttatatatcataaagggcttcgacaaggggtttgattcgttctttgagcaaaaagataaggtcggaataccggagttctttctttgcttccaagaacatagattccttcttcaacccaggtcatgaccgagggcgggtatctcactcgcatatctagagcccagcatctctcctgaacgacaccttctgcagactctactggtggtatttcccgaggcgagggtcaatatgtgcattcatatcggtcaggaaacgacaatgactcttcttctttccgggaagctatgggcacctcacaattcttatacgacat

SEQ ID NO: 10571 - DNA, 316 bp, Triticum aestivum
  Clone ID: LIB31-017-Q1-E1-G3
gtccacactcttactgaagaagtgtcctgcgagacgcccatcaacgagtatgtccagtcgtgtgacatcgttgccttcaacaagatctagaatctttgttcacccacttgttgctgctggattcttggtactgggatctgtcgatctggaaaacattattgtcgtcccatttagttacccctcttacagaaatgctgctggttttgtttttgagtgatgccctggtcttgaatgtctgctacctttaaatagttgaactgctgagcggtttgtaatggcgaaacatctatcatgtggagtaaaatcagtctttgat

SEQ ID NO: 10572 - DNA, 436 bp, Triticum aestivum
  Clone ID: LIB31-017-Q1-E1-G4
attccagggtcgactcgaactcaatccctctcccgcttactacgccgtggccccgcatgctgtagtactcctacaaaccataccgccgcacgcatcatcagttttcttcaagaggacgagggagaagcggatttgtagtggaggcgctttaaaaaaaggatttgtagtggaggcccctaccctagggtgccctaggtagctaccgcacacatcattggttttcttttttctttatactcttgcgccctagagtgaaatgatggttgcttcatccgtccaacttaatgcgggaaaggtggggctttgtgatttgacccctcatcgctcatttactactattgcggcgctacgaccggggtgcctccaagtccaaccgctgctccgaactataatttggtgcatcacgcgtggaacaagatggtggatgagccacatg

SEQ ID NO: 10573 - DNA, 380 bp, Triticum aestivum
  Clone ID: LIB31-017-Q1-E1-G7
tcccgggtcgacacatcacctaaaggagaggctaagggctgcttatgcggacaaacaacatgccgaatggcaggaagccgctggtcatcatgtatcgacacaaaccattaatgagaagaacaaactaccggatgcaaatatcaagcaagccgaagaactgaaggatttaagagcccaactatcggatgctttcaaggagaacaggaagctgagaggcagcatattcagtatgctctttaacctgactgtcacatggtctcctgtttgaaaatttgacaagtttacttctgtaggtgtgctaatcagacaccccgaaggagaagtgtctggattccaaggcgaccagctacaagagctatcaaaggtgcacgaacaagcac

SEQ ID NO: 10574 - DNA, 431 bp, Triticum aestivum
  Clone ID: LIB31-017-Q1-E1-H1
gggtccacctaccgtccgaaaatgaatgataagagggctcaggtcagaggtgctcaaggctctgtgagtagagagaagcatgatgcatctgctgccaatgccagcgccacctcttcgaaacccaccacctcggccaaggctccagaaccaccaaagggttccaacaagtcccggaagaaaaagtcgaggtcttaggcgacaaagttgttatgtcacaaattaacagtatacaaaggacactgtccattttagtatcttgacttgatttttttgtgttatctgcattggattggcctgcgctgtgcctttagaaccatgtttatggcgacttgagatcctagacttgttgcaaatttttgttaaaggtgtctgacttacctggtttgaaattcccttcctttcaatacaataataaatttccttgcaatttt

SEQ ID NO: 10575 - DNA, 453 bp, Triticum aestivum
  unsure at all n locations
  Clone ID: LIB31-017-Q1-E1-H2
gcaggcgtccgaaattctagggtcgacctcttgaccctgctgggatatcgctggtaccctcagtacactgtgtacgagatctaccgcgagttcaaccaggagatgtatcacgctaaggttgatatctatgatcggcagaacaactccacccacgagttgcatgcctttgagggtattggagtgactgtcgagatggcagtacaggaggttgcctatgttgctatcaccagcctccgtagagggcatccacgcttggaggagactgggttcagatacttcccgtacccaccagctggggatgatactangcggtacactgctgtgtgtaccccttacgtgagccgccggtacgacccttagtatatggttcgatacaatgaggttctggatcgcactgttcgagctttgactgttgagctgtacgccacgcgtgcacgccactacgacactctg

SEQ ID NO: 10576 - DNA, 418 bp, Triticum aestivum
  Clone ID: LIB31-017-Q1-E1-H3
gggtcgacaaaatttgttccgacaattatgaacattctgaagagactagctgatgagggggcagcgcccgcagccccagagaggcagagagagacggagctccaaccaaggaataatagttcaaacagcaacgtgacatcagcaggttcctccagcttaacctcttcagagaatggacctgaatattcaagcccggtagcacaatgatgagtggatccctagcttttagctgaaagctttgtagctgcaacggtttgagcctaggagattgaagtgccttgcggtttttgtacgctcgcttgcccttcccaacctgatgtatgaaaattatgtggaagagtccacagctgttatataaggaattttggggctgggaatcgtttgtaagaaacattgtagaataacttctggttcactt

SEQ ID NO: 10577 - DNA, 397 bp, Triticum aestivum
  Clone ID: LIB31-017-Q1-E2-A9
ggggtttgagaattggtgtaagagaaacgattgaggttttctcttattatctaaacccaccaagtctttcaggattttagccagagaagcttgagtctttgattagggacatgtcaacctccgccgcttccttgtgttgttcatcaacccaggtcaatgggtttggtcttaggcctgaaaggttgcttctttaccaacccacttccttttctttctccagaaggagaactcatggaattgtcaaggcctcatctcgggttgataggttttcgaaaagtgatatcattgtttctccctctattctctcggctaatttcgccaaattaggcgagcaggtaaaagcagtggagttggcaagttgtgattggattcatattgatgtcatggacggtcgttt

SEQ ID NO: 10578 - DNA, 424 bp, Triticum aestivum
  Clone ID: LIB31-017-Q1-E2-B1
cccaagtccaagtactggtacatcctcaggaagctcaagaaggtgaagaaggccaacggccagatgctcgccatcaacgagatctttgagaagaaccccaccaccatcaagaactacggcatctggctgcgctaccagagcaggaccggttaccacaacatgtacaaggagtaccgcgacacgaccctgaacggcggcgtggagcagatgtacacggagatggcgtcgcggcaccacgtgcgtgccccctgcatccagatcatcaagactgcgacggtggacttcaagctgtgcaagagggacaacacgaagcagttccacaactccaagatcaagttcccgctggtgtaccagaaggtgcgcccacccacccgcaagctcaagaccacctacaaggcgacgaggcccaacctgttcatgtgat

SEQ ID NO: 10579 - DNA, 441 bp, Triticum aestivum
  Clone ID: LIB31-017-Q1-E2-B12
gtccgacattcccggggccactcccacagcaaaagatagccagcatctcatcgaaacatcgggacacctttgcctctatcaagtggtatcagatttctaggttgctcggtgagattttacagtttttcgtagattagatcgagtctgttcttcatacctacagtccacgaaaaagccacaaaaaaaattagggttagttcatcatatccgaaccaatctgagcctttgcataatctttttagggtttttgcttggttgaatttgcggttgcatcgtcgtgtcaacttgctagtcttagagtctagtcttttagagtttcgagttttggtcataagttgtcacgccgctgccgcaccatcatcatcgcccgtccaccacttttgcttatccgccagcgctctgaatccatatccatataccaccaccaatccgtatccatat

SEQ ID NO: 10580 - DNA, 447 bp, Triticum aestivum
  Clone ID: LIB31-017-Q1-E2-B2
ttcccgagtccacaagaaccaagatgtgcttgattccatgcacaacgctctctctatctaccgcgagggttggcaactctgcgtcaacgagggcgaagcaccggctcttcgaggatttgcaggtgctgacacattggaccaacaccatgataatggcaactctgcctcgttaatgtcggccaccaacgatgataaggccaaaccgccccacatggccattgacctcacctccaacgggaggaatagattaggttttcagttgtttttagggttttctttgttatgtataaattacttcgaaatgattgaaaaatcggtgtccaccttatttgattactctggttggatgggctccgcccagctggctatccacaaacatgtccgacaatttttttgaaggcgtacttatttgtattcaagcaagcggcaaaccaatacatgtacaat

SEQ ID NO: 10581 - DNA, 452 bp, Triticum aestivum
  Clone ID: LIB31-017-Q1-E2-B3
ttcccgagtccacaaggccatcctcaccctcaagacgcagcgccgcaagctcgcgcagttccagcagcagcttgagaaggtgatcgaagcagaaaaggaagctgcacgccagttggttcagcaaaagaagagagacagagctttgattgcactgaagaagaagaaatcccaggaagagctcctgaaacaagttgatacatggcaaatgaatgtcgaacagcagctggcagatattgaactagcaagcaagcaaaaagctgtattggaaagcctaaagactggaaatgctgcccttaagtctatacagagtgagattaacatcgacgatgtccaaaagttaatggatgacacagctgagaccaaggcttatcaggatgaaataaatgccgctctgggtgaacaactatctgctgaggatgaggaggctgtcatgggtgaatttgacaacttgg

SEQ ID NO: 10582 - DNA, 393 bp, Triticum aestivum
  Clone ID: LIB31-017-Q1-E2-B9
ggagaagagatcgagagaagaatagtttgatcatcttgtgagaaaaataatggctgctccagtgatgctatcttcggtgacattgaaaccagctggtttcacggtggagaagacggcggctagaggattaccgtcgctcacaagagctcgtccctccttcaaaattgtcgccagtggcgtcaagaagatcaagaccgacaagcccttcggaattaacggcagcatggacttgagggacggcgtcgacgcctccggcagaaagggcaacggatacggtgtttacaagtacgtcgacaagtatggagctaacgtcgatggatacagtcctatttacaacgagaacgagtggtcagcgagtggtgacgtgtacaaaggaggaatcaccggattggc

SEQ ID NO: 10583 - DNA, 301 bp, Triticum aestivum
  Clone ID: LIB31-017-Q1-E2-C12
ctactgaacgactgacgggggacacgacatcgatacaagactagtttgatcaacctgtgagaggtataatggctgcttcagtgatgctatcttcggtgacattgagaccagctggtttcacagtggataagacggcggctagaggattaccgtcgctcaacacagctcgtcgctccttcaagattgtcgccagtggcgtcaagaagatcaagaccgacaagcccttcggaattaacggcagcatggacttgaaggaccgcgtcgacgcctccggcagaacaggcaacggataccgtgttta

SEQ ID NO: 10584 - DNA, 445 bp, Triticum aestivum
  Clone ID: LIB31-017-Q1-E2-C2
attcccgagtccacgtatcataggcaacttctgtccaatgagtggatgacatctgtcccaacgatgagccgacacgtatttcctccagccaatgatgattttacacgtggaaaatccccattggtcggggctgttaacggtttatcggatccaaaacccgacccgatagcttaacgacgttccattacggtggatgccacgtgtcggtcacccttgacgaaatcacttttgtgacacgcgatttatcgtcatggaagtgcacacttctgtgatgataattttggtaaagtcatggaacacttctacgatagcacaggtatgactatcttgattctgtcataaaatcgtcatggatgtacatgcatgacaaaaaaacgcgacctactgtgacaaacacgtatcatcacggaagtgtatttttttgtagtgattgtcccaaataaaa

SEQ ID NO: 10585 - DNA, 447 bp, Triticum aestivum
  Clone ID: LIB31-017-Q1-E2-C3
ttccctggtccactccttgtatggctggacatattgctagcctactccagtcatcgctacaatcggctgttacagcagtatgttactttcctatgatatcatgatggcttgcttatattactctcaacatttactgaaaaaatattcatgctcataacatgcttttcttaagattgactccaacttgatatgatgttgtaggcctcttggtgcccctacccttcctaatcccagaacctttcaaagtaaagtggcatggcagttgcaggtggttactggctcgatcagacaacggcgaacgattgatgatcgttctcacgtaccggacgtgttgtttcgcggaatacaatcatagtcactgcaaaggtctttgagcaggatcctagcttctttgggccttcaggaatttttgactggaggctggtaagtagccttggtacacgctct

SEQ ID NO: 10586 - DNA, 406 bp, Triticum aestivum
  Clone ID: LIB31-017-Q1-E2-C7
gatgagaaagattggttgtcacttgttgcggtgcacagtgatgcctggttgctagcagtagccttctactttggagcaagattcgggtttgacaaagaatccaggaagcggctttttagcatgataaacaacctccccaccatatatgaggttgtcaccggaactgcgaagaatcaggtcaaagaaaaacaccccaaaagcagcagcacgataaataaatctggcactaagccatctcgccagccagaacctaactcaaggggtccaaagatgccatcacctccgaaggatgaggacgacagtggaggcgaggaagaagagggagaagaacatgataacgcattatgtggtgcgtgtaacgataactatggacaggatgaattctggatctgctgtgatgcttgtg

SEQ ID NO: 10587 - DNA, 402 bp, Triticum aestivum
  Clone ID: LIB31-017-Q1-E2-C9
tatgatgaatcccttcagagcgatgcagccgcgagattgccagtcacacttgctctcgctagcttatggctccgtagaaactatgctgataccgtcctggtgagagttgtggattcattaccagaagtgtatccgaaggtagagacttggatcgagaatgtggtgtttgaagaaggtaatgcaacaatacttacactctttgtctgtctcatcacaattctctatctccgggaaagacaacgtagacaagtcgtcgttgttgccgatccagtggctgctgacgtggcacaaccgctcgacgctgatgtggcgcaacacctcgctgcgttcccacggtaatcaattgataatcgttttcgtcattgtaatagcagagaataatggctttttggtgtgtttttt

SEQ ID NO: 10588 - DNA, 408 bp, Triticum aestivum
  Clone ID: LIB31-017-Q1-E2-D3
caccgacccacgatacgcatgtcatagcaggcgatgacctgacattaatgcagctgcaatgatgagggtggctgcaaacgagaaggcagaggctgataacattgtccagatcaaccgtgccgatggtgaagcaaaggccaagtacctgtcaggcctgggtaacgcacgccagcgccaggccattgtggatggccggacggacagcgtcctgcgcttctcagtcaatgtgcctggcaccactgcataggacgtgattgacatggtgctaatcacccagtactttgacactaagaaagacgttagcgcgtccaccaagtcctcggctgggttcatcccccatggccctggcgccgtgctcgacatctccacgcagatccgcgatcgtcttcttcatgggcagtctgcctc

SEQ ID NO: 10589 - DNA, 397 bp, Triticum aestivum
  Clone ID: LIB31-017-Q1-E2-D4
ccccatctacctaatacgtctctagagaaacggttttgagaacattttagaacgttcctatccagtttttaccattttggggatcctcgtatatgggttttgactgttttttcattaatttttcccttttgtccttttagtttatattatgttaatttttttccaatatacaaaattttcaaattttcaaaagttaattggaattgtgaaacattgttaatgatttccaaaatgtttacaagtttcaaaaattggtttttggaattttaaaaagttcctaattttttcaaaaaatgaatagaacttgtcagaaaatttcttttacaaaaaaagaacataacctattcccaattttaaaaaagtgtttgaaattttcaaaaactgttgtgggtttcca

SEQ ID NO: 10590 - DNA, 405 bp, Triticum aestivum
  Clone ID: LIB31-017-Q1-E2-D9
gggcgaagtaataagtcgtaataaccctaaaaatcttgccctctttttcgccgccggctaaagctatgaaggtttttaatcttgaccgtggaaacactctctctgttttcctcttctccggtgtcaccaactccaaggagctcttgaattcaatgcttgacggaagtctgaagctggaggtctcatttctcaatgcatcacttattccagacatttttcctctattggctgctgctcagaaagcacttatctccaaatcacgcgattccttatcaaccagaactcttcattctgagcttgtctacaattactcaggatctaagcacattacagaatcattgaaacgatgtgggatttctgagaacactacttacattctagctgcccggttcaatgcttctcccg

SEQ ID NO: 10591 - DNA, 390 bp, Triticum aestivum
  Clone ID: LIB31-017-Q1-E2-F11
aagagcttttgtatgtggtcgcaaaggttagagaatacatattactttgaagcaatatgctgtgaagaaaatgtatgtggaaacataaacctagctgttatatgaccatcctgacttcctttaggaagatattcaaagcagtgcaatctttgttgcccatctgccataacacatttccgtaggttctcatatttcctttcatgtcagaacaatatccaagaaatcgtacaatattcttgtgcttcgccttcatgagacactcgatctctcctagaaatttttcctcgtgcatgtacgtattgatatgtctctcctagaaaattttctcttttaccgaaaaagggtttccccccgctttgtatacagagcaaccaaccgaaccatccaacg

SEQ ID NO: 10592 - DNA, 435 bp, Triticum aestivum
  Clone ID: LIB31-017-Q1-E2-F12
gggtccacttccaccaaaataatagccaccatctcatcgaaagatcgggcctctcagctctatcaagtgggatcagattttcaggttgctcagtgggattttatagtttttcgtagtttagatggagtctgttcttcatagctacagtctaccacgaagccacaaaaaaattatggtgagttcatcacatccgagccagtctgagccagtacataatctctttagggttttgcattgtagaatttgcggttgcatcgtcgtgtctagttgttggtcttagtgtctagtcctttagagtttcaagttatgttcacaagtagtcacgccgccgccgcatcatcatcatcagcgctgccatagaccagcatcaacatcactgctgccatataccatcaccgtcatcaccgctgcgatatagcacatatccaccgccat

SEQ ID NO: 10593 - DNA, 459 bp, Triticum aestivum
  unsure at all n locations
  Clone ID: LIB31-017-Q1-E2-F3
cgcctgccgngtacggcccgaaattcccgagggccgcgaggtcgtcaagggcggcatcgagctcaaggactcggccaaggtcgcggatctgcaggaggccatccacgccaagactaagaagtattatcctgctaggcaacggctcaccctccctgcacagcctggaaaatctggaaagccagttgtcctcaatcaaaaggccagcctatcggaatactgcgagaagggttccgggtccctgacagtggtcttcaaagatttaggcccgcaggtctactacagcacgctcttcttctgggaatacgtcggccctcttatcatctaccccatcttctattacctgcccgtctacagatactttggatatgagggggagcgggtcatccaccccgtccagacgtacgccatgtactacttctgcttccactacttcaagaggatcatggagaacttcttcgt

SEQ ID NO: 10594 - DNA, 375 bp, Triticum aestivum
  unsure at all n locations
  Clone ID: LIB31-017-Q1-E2-F9
ggaagttgcagagaatctagcgagaccaatggctactctggtctcgtctcaaacttacatctaccattgccatattagtaaacaagctctttatcaggcaaaagaatcatactctcatcgtagaatttcccgtcataatcacagagaaagactcgatttttctcatagaaaccatagattgacaataactagaaagcagcaacctttgtctttcaacaccgtgtgttttgccgcagacgagccctccgaaatcagtgctgatgctagaatccgtagtgaggttctgtctccgttcagattagtccgtatgttcttctacctcgcctttatagcaagcggttcattangaggactaatagccacttctaggctcat

SEQ ID NO: 10595 - DNA, 450 bp, Triticum aestivum
  Clone ID: LIB31-017-Q1-E2-H2
ttcccgagtcgacctcgtgaccctgctgggatatcgctggtaccctcagtacactgtgtacgagatctaccgcgagttcaaccaggagatgtatcacgctaaggttgatatctatgatcggcagaacaactccacccacgagttgcatgcctttgagggtattggagtgactgtcgagatggcagtacaggaggttgcctatgttgctatcaccagcctccgtagagggcatccacgcttggaggagactgggttcagatacttcccgtacccaccagctggggatgatactaggcggtacactgctgtgtgtaccccttacgtgagccgccggtacgacccttagtatatggttcgatacaatgaggttctggatcgcactgttcgagctttgactgttgagctgtacgccacgcgtgcacgccactacgacactctggagcagatgcg

SEQ ID NO: 10596 - DNA, 441 bp, Triticum aestivum
  Clone ID: LIB31-017-Q1-E2-H3
ttcccggggccacaaaatttgttccgacaattatgaacattctgaagagactagctgatgagggggcagcgcccgcagccccagagaggcagagagagacggagctccaaccaaggaataatagttcaaacagcaacgtgacatcagcaggttcctccagcttaacctcttcagagaatggacctgaatattcaagcccggtagcacaatgatgagtggatccctagcttttagctgaaagctttgtagctgcaacggtttgagcctaggagattgaagtgccttgcggtttttgtacgctcgcttgcccttcccaacctgatgtatgaaaattatgtggaagagtccacagctgttatataagggattttggggctgggaatcgtttgtaagaaacattgtagaataacttctgtttcacttttatttttgtaatatctt

SEQ ID NO: 10597 - DNA, 154 bp, Triticum aestivum
  Clone ID: LIB31-018-Q1-E1-A10
ccgggtcgacagcgaagacgagggctcggcatcgtcaatgaaaatatgacacaccgcacatgtaacatttactgtacgattgaactgtgctttcttagacggagatcaatctttgtacagtgatgttagaatatcacttgaagtgaacatctca

SEQ ID NO: 10598 - DNA, 417 bp, Triticum aestivum
  Clone ID: LIB31-018-Q1-E1-A3
ggtcgacgctcgtcatgaaaggtggaagcaaatgcaagttcataccaaaagatcgttaacaacaataccaacttgcggacgacaaggtagtacaactaccaataccaaactactcctggccctagtgttcgtcgggtagaaaatcttgcagaggaccagttcccgctccttctcttgctccaggtccccgatgtggtactggtgtatcacccagttggtcctctgctggtcgaagttcttgttggtgtgcagcgccagaaccttttttgctgcccgtctgccggccgttgaccatcacaggcaaggtattgccggtcttgtgccacatcgcgtgcgtgccgcactccgactgtatctcgcgacacgtccacgtgccccttttgatcgccctggaagtgcgttggaagaaatgcttcc

SEQ ID NO: 10599 - DNA, 443 bp, Triticum aestivum
  Clone ID: LIB31-018-Q1-E1-A5
actcgcgggtcgacagggaaccctatactgagtctcacgattttgttgtcatcgcacgcaacataagatggcaccgcatttgattcattcctttccggaaagatatatatagtttaagagatgcaacaaggagcggctagcactataaacttaagatatgatgatatatatggcacctcaccttggtgttttcgccaagaacaaagctgtgaggctggccggtgaccatggttgctacttccgcccacaacacacactttccgtcctgaacccatccaagatttttctcctcctcctgctgctgctgctgctgcgcttttgacagcaagtcgctcaccggcggcaaatccaggtgagcttgaaccatgctttcttctaagtgcggatttcgtttcttcgtctgcgttccagccccatgcgcctttgtttttccgtgtgccgtt

SEQ ID NO: 10600 - DNA, 402 bp, Triticum aestivum
  unsure at all n locations
  Clone ID: LIB31-018-Q1-E1-B1
gtcgacgacattgtcaatctggggcccgtatttctacacaatatgttcccctttgagaggttcatgggagtcctaaagaaatatgtccgtaaccccgctaggccagaaggaagcatctccatgggccatcaaacagaggatgtcattgggttttgtgttgacttcattcctgtccttaagaagataggtctccctaaatcgcggaatgaggggagactgactggaaaaggcatgctangagcggactcaataatatgcagggacgggcattcttggtctcaagcacactacacagttctacagaactctaccttggtgacaccgtatgtcgatgaacataagaacagtctgtggtccaaacacccggagcagtgcgacgactggattacatgtgaacacatc

SEQ ID NO: 10601 - DNA, 419 bp, Triticum aestivum
  Clone ID: LIB31-018-Q1-E1-B10
tctcccgagtcgtccgcctgaatgagtcagtatttgtaatagagatgggacttctgaagctggaaaatgcctacaagtttcccaacctgcgctgccgggggtgggcgtgcagaaccaagcttccatccaacacagctttgcgagggtttggctttccccaggcagggctgatcaccgaagcctgtatcacagaagtggcagccaaatgtgggttgccccctgagaaggtccggatgatacacatgtacaaggaaattgatcaaacaccctacaaacaggagattaataccaagaacctgacccagtgttggaaagaatgcatggccacgtcttcctacaccctaaggaaagcagcggtggagaaattcaactcggagaattactggaagaagaaggggctggcaatggtccccctgaag

SEQ ID NO: 10602 - DNA, 433 bp, Triticum aestivum
  Clone ID: LIB31-018-Q1-E1-B11
actcgcgggtcgacgcaaccctggaacattgggcacagatcaggcagctgatgagatcaaaagcattgctgccattctttgacagtgcttatcaaggatttgcaagtggaagccttgacaaagatgcccaatcagtgcgcatgttcgtcgctgatggtggtgaattgctcatggctcaaagctataccaagaacatgggattgtatggagagcgtgttggtgctttaagcatcgtttgtgggagtgctgatatagctgttaaggttgaaagtcaacttaagcttgtaattaggcctatgtattcgaaccctcctcttcatggtgcttctatcgtggctaccatacttaaggacagtgcgatgttcgacgaatggactctggagctgaaggccatggctgataggataattagcatgagggagcagctttttaa

SEQ ID NO: 10603 - DNA, 348 bp, Triticum aestivum
  Clone ID: LIB31-018-Q1-E1-B7
acacatggaggctgtcatgctcgctgcactcagtcaccttgtgactgtgtggatcactgggcggtgactagctgcaattcacgaaggcataacattggcactcagttggacagaattggaccttgtggtagagagcgattgtgcggatgcgctacatttgatctctgctgtggggaaagatcggtcagctcacactcataaagtcatggagattagatccctgctagctcaagaaagaaggatccagttacagaagattaagcctagtgtaaatctcgctagccacactctcgcccatttgggacgtactcaacagcggactgctgtttagctgcgtaaccctcccga

SEQ ID NO: 10604 - DNA, 443 bp, Triticum aestivum
  Clone ID: LIB31-018-Q1-E1-C11
gcacaggactaggactcgcgggtcgacaccatcccataacatgcgacctactatttcggtgctctgcgtgctcgggtgtacgacgacgaggtgcgcaagtgggtgacctctaccggtatcgagaacattggcaagaagcttgtgaactcgcgggacggaccagtgacctttgagcagccaaagatgacagtcgagaagctgctagagtacgggcacatgctcgtccaggagcaggacaatgtcaagcgtgtgcagcttgctgacacctacatgagccaggcagctctgggtgatgctaaccaggatgcgatgaagactggttccttctacggttagaacattctccatacacacccaccatctcttgctgcataggaggaggtaaaggggcacagcaaggtactttgcctgtgccggcaggatgcaccgaccagactgccaag

SEQ ID NO: 10605 - DNA, 391 bp, Triticum aestivum
  Clone ID: LIB31-018-Q1-E1-C12
gaggcgtatgacgccatcgccgtcgaggcttcgcatccgcagccgccagcggcactcaagattgacggggtgctcaaggcgctgagcctggcgtccccaagcccaagaggtggcttctcggataagcctatgtacaccgagaagcccaccaagtacgccggcagcccgatgagcggtggcgcaccgcgcttcagccaccagcctcgctatgttgggatgtcaagcttcaagaatcgagcaaatcctgcgcctgcagtgatgcattgctctggctgccgccgccgtctcatctttcaagtcttcttctacgagtagtaagtaatggtgtccgtttgtatatgatattaagtacgtacaaatgaaatgacctaagaaaaaggcaacaaaatgc

SEQ ID NO: 10606 - DNA, 444 bp, Triticum aestivum
  unsure at all n locations
  Clone ID: LIB31-018-Q1-E1-C4
ggtcganacattagaccttgtaaaaccaccgaacagcaactgataatatccatacaaaaaaagacaacctgacctgatactagctcacttaaagaagggagcttctgcctgtcacatacgcacacatactatctcttgtacagtgtatatatatcacaatatgtaaaatggtagcagtgagttgttgagacatccagcacgtttgtttcttgatgaagcacttgtcgaggcgcttcaagccttgttggcaatgttgttggagagccagtcaagtccctcgtacaacccttcgccagacgtcgcacaagtgctctgaatgtaccagtgccgctggcgcaaggagtgcagaccaagcttgtcggtgatttcagcagcattcatggcattaggaagatcttgtttgtttgcaaatacaagcaacacagcatcacgcagctcatcctc

SEQ ID NO: 10607 - DNA, 444 bp, Triticum aestivum
  Clone ID: LIB31-018-Q1-E1-D2
ttcaagggtcgacagagttctacaacttcaactctcagcggccgagcacccgctattgggtatttggccccgtcaaatttgaggtgttcttgcctgaccttaacacttggtttctgtatgatacatcagtgctctttgaggcaaaagtttctcgaccacacatgtttatagatggagcattgtatgtgcacacaggtttgcatgacattctggtcctggaggaaactagttctggcattccgccgtctcttcggactattaagttgccgcatgaagatggtgcctttatgggtaggtttggccaatgttgctttggccaatcttcggggggcttgcactatgcattgccagaggaggatgctcgtacgattcttgtttggagtcttgatgttgatgagccttatgagtggagcctcaagtaacgcctcaatatgagccaagcat

SEQ ID NO: 10608 - DNA, 440 bp, Triticum aestivum
  Clone ID: LIB31-018-Q1-E1-D3
cacgggtcgacgagattgtcaacctgggtcccgtatatctacacaatatgttcccctttgagaggttcatgggagtcctaaagaaatatgtccgtaatcgcgctaggccagaaggaagcatctccatgggccatcaaacagaggatgttatcgggttttgtgttgacttcattcctggccttaacaagatatgtctccctaaatcgcggtatgaggggagactgactggaaaaggcactcttggaagagactcaataatatgcagggacggatattcttggtctcaagcacactacatagttctacagaactctaccttggtgaccccgtatgtcgatgaacacaagaacagtctgtgctccaaacacccggagcagtgcgacgactggattacatgtgaacacatcaggactttcagcagttggttggaaacacgtctc

SEQ ID NO: 10609 - DNA, 446 bp, Triticum aestivum
  unsure at all n locations
  Clone ID: LIB31-018-Q1-E1-D4
ggtcgacgatgctccggtaggaacagcacaacatcatctttctcataaacaacgggggttacaccattgaggtggagatccatgacggcccttacaacgtcatcaagaattggaactacaccggcgtggtggaagcattccataatggcgagggcaagtgctatacggccaaggtccgaacagaggaggaactgaagaaggcaattgaggcatccctaggacccaacaaggacagcctgtgctttatagaggtaattgtgcacaaggatgacactagtaaagagcttcttgagtggggttctanggtttccgccgcgaatagccgcccaccaaatccccagtgacacatcaggtctccacaagatcctcatccagcttaatgatgtcatgtggaagttctgaatagatgttactgttctctgaataaatcatccatttgagtccat

SEQ ID NO: 10610 - DNA, 425 bp, Triticum aestivum
  Clone ID: LIB31-018-Q1-E1-E1
actcacgggtcgacgctacaccctaaaatgaggcattctaggtatctacgatgagcccatgactcctggccagtgcaatttggtcgtggagaggctcggcgactacctggtcgagcagggtttctaagcccgccctgatatgctgttattttggtcgtctgggactaagtttgctctactgtgggctttgcatccatctgcttggcgtaccgcatgatatatgcagtgaataattttagcttggggtttgtcggttggtgatgtgtcgaaggggaaaaatggatttactatgttttctttttaatgtttggcatcgcgtcgtatcaaactcagccgctctttcgctgagtaatgtacatttgcctggtcatggtaacttgtgggttctgctgctgctttattgaaagatgattgcaattttagct

SEQ ID NO: 10611 - DNA, 443 bp, Triticum aestivum
  Clone ID: LIB31-018-Q1-E1-E2
ggtcgacgctgtcgcgcgcgtccggtggtctgcagtacatgggacatactacccgcgattgggtaaagaagcaagcacgtaatagagcatatctcttgagcattctgtcggtaattattccctgtttgatgagatgagtttgcattgtgtctaaaaatgttggaaacagaagtttgccagagaagagtctgaagatgatgtcaagaaacttctggatttctttaagaaaatgcagaagataaacccagagttcttctatgattaagaagttgatgcagataaccgtgtaagaaatgtcttttgggtgaacacaagttgcaaaggatcgtatgaagattttggagactgcgttacatttgacacgatgtataaaactaacaaattccacatgccgctgggagtctttgtgggggtgaaccatcatctatagagcaccatatttg

SEQ ID NO: 10612 - DNA, 433 bp, Triticum aestivum
  Clone ID: LIB31-018-Q1-E1-E6
acgctaaaccctaaattgagtcctattactacacccaggccattgaggcggggccggccaccgcggaactctacgccgaccgagcccaggcgcacatcaagctgggcagttacactgaggctgtatctgatgccaacaaagcaattgaacttgatccttcgatgcataaagcataccttcggaagggctctgcttgcatcaagctggaggaataccaaactgcaaaggctgctcttgaagtgggttcttcatatgcatctggtgactcgaggtttactcgtctgatgaaggagtgtgatgatcgtattgctgaggaggctagccaggtgccagtaaagaatgccgctgcagctgttgctccagctacatcttcgggggcatcttccggggctacaactgtggctactgaagttgaggaacaggatggtgcaaa

SEQ ID NO: 10613 - DNA, 442 bp, Triticum aestivum
  Clone ID: LIB31-018-Q1-E1-F11
gcacaggtccgaggactcgcgggtcgacactccacgctacagtgattcgacataaattctttcgcatccagtcggagtttgcggaaatcatccatcaagatgtccttcgtacctcggggcagttctacctcagaaatcaaccgtccaacagtgacatcgacacaatgctacaaatgcaggatgacaacgcccgttctttcatgactcccacgatagacggcggcttcatccacgctccggtcccttgagtcgagttgtctagttctgaaacatcgattggctcatgttgtaattaaactttaatgaacttgtagtatgtctctttggtttcgagagtcgttcaacttagatgtaatcgatgctattaatgtcttgcttttctcttccgatcgttctgttacatacttatatattgcttatgtattgtctgtgaattggtact

SEQ ID NO: 10614 - DNA, 447 bp, Triticum aestivum
  Clone ID: LIB31-018-Q1-E1-F2
ttcaagggtcgacttccaccagtgagatatccatcatctcatcgaaagacgggacacctttgcctctatcaagtggtatcagatttccaggttgctcggtgagattttacagtttttcgtagtttagatcgagtctgtcgtcatacctatagtccacgaaaaagccacaagaaaaatttagggttagttcatcatatccgaaccaatctgagcctttgcataatctttttagggttttgctttgttgaatttgcggttgcatcgtcggtctagttgctggtcttagagtctagtcttttagtgtttcgagttctggtcataagttgtcacgccgccgccgcaccatcatcatcgcccttgccatctaccaccaccgctccgaatccgtatccatataccaccaccaatccgtgtccatataccaccaccgatccatatccatatact

SEQ ID NO: 10615 - DNA, 376 bp, Triticum aestivum
  Clone ID: LIB31-018-Q1-E1-F5
cggaacgactttaatgccttcccaccaacacaagcttgttcgtgtttggtcttattccgtgagttccttgctatccaataactgttattctttacattggtacattaaaatcacttatgtcctcaatgttgtgataaattcaccatccttacgaattcttgataccagtgagacttagtatcatcaccactcgttgcttggtcctcgtgatgtttctaaccggaataccgacacatggtgtgtgatgtgtagattctaaactttgagcaatcatcttgttctgaagttattggtctatagtttcactctacgactatggcatattgaatcaacattctgacattggtcgtgcaaggcagaccatatttagggcgca

SEQ ID NO: 10616 - DNA, 445 bp, Triticum aestivum
  Clone ID: LIB31-018-Q1-E1-G2
ggtcgacagtgcacccgacagggcgccggagcaccgcaagaacgccaccaagtttgtcaaccaatgcggagccattgttagagacaacgtctcgatcaccgtccaggagtggaataagccaaagaaggcacgaattgctggtttcacttttgtcgataagagaacaaaaaaagattgcttcaagaagcttatggaacatttcgttctacctccggaatacaacaaattcgatgaggagggtaacaagattgaggaaaacaaggagaggaggaggctagtcaaacagttcgctcttcataagatggccgacgcattccggaaattcaagcaaaatctagcccatgactttgtcaagcagaacaagactccggatttcaaaggacaatatgagaaactgaaacatgattggccacaatttgtgaagcaaaagaaatcggagcagttc

SEQ ID NO: 10617 - DNA, 446 bp, Triticum aestivum
  Clone ID: LIB31-018-Q1-E1-G4
ggtcgacgcttcacctggtgctgcgcctccgcggcggcagcagaggtggataccccaagaaccttgagcccaacctccgcatccttgctcaaaagtacaatgagaacaaactagtctgccgcaggtgctatgcacgactacccaccagggccaccaactgccgtaagaagaagtgtggccataacaatcagctaagggaaaagaagaggtttatgtccaagtttgccaacgcttcctaaacgttggaaatatgctgaatcaaccgtctagcgtcatatatattggagtttaagttctgtcccttgtttgaagtcatgttggatttcgctgaatcgtctagcgtcgtcatatatagtggagtctaagatttgtccagttgatagtcctgttggattttgaacctatgtatgctttggaatatattatctatcaaatatcctgatttg

SEQ ID NO: 10618 - DNA, 430 bp, Triticum aestivum
  Clone ID: LIB31-018-Q1-E1-G6
tcccgggtcgacagatagtgttcattcttctctgaatggattcatggcatagagaagaagttcctggcgcaaggaaacggatggggatggcctccttcatcggggtcgaacaccggtgtcgatggagcaccatttctttgcaaagtgttttcgagagaacaaggaagggagaggctggagtttatgcggggtggaagaggaggtggaggtgcacaaaaaggaggggctgcagtttttggaaactgatgggatttatgggaaagagggatggctgtttctcttcgttaggtgtggctgtacgtttcttcgctgtgtgtctgtgtgtgtagagggagcggagggagcggtacagaaggaagaggaaggagaagatgcgctgggtgggaggaaaaggaagtggagagaaatagacgaaggaggaattaaagga

SEQ ID NO: 10619 - DNA, 439 bp, Triticum aestivum
  Clone ID: LIB31-018-Q1-E1-H4
gtcgacagccggtggtaaatctggtgatagctcccctaataagctcgaatctttccctgatctggaggttctccgtcgccttgttccatttgtccgtcgctgtcgtggagatggggacagaaagtggaagaggtggagcgcaagtctgtttcgattgggtttgtgcatattctcatcggtgcttggagtggagctacggcgcccactggagctgccggtctccgacgcctccccggtgacctttctggccgaagggcggcctggtgaagccatgctgactttgtttcttcctcctggcttgatgccatttgagaggcagctgttcaacttcaacatggagtcctcttcttccatctttgtccggagatggagtagcggcggtccggtgatcccaagtggccacgtcctcggtgatgggcggactggatctacgctggag

SEQ ID NO: 10620 - DNA, 440 bp, Triticum aestivum
  Clone ID: LIB31-019-Q1-E1-A10
cgggtcgactgctacctcttgagcactgcgttggttttcccttgaagaggaaagggtgatgcagcaaagtagcgtaagtatttccctcagtttttgagaaccaaggtatcaatccagtaggaggccacgctcaagtcccttgcacctacacaaacaaataagaaccttgcaaccaacgcgataaaggggttgtcaatcctttcacggctaattgcaaaagtgagatctgatagagatgataagataatatttttggtatttttatgataaagattaaaagtaaagattgcaaaataaacggcgaaagaaatagcttgttgacggaagatcaatatgatggaaaatagacccgggggccataggtttcactagtggcttctctcaagatagcataagtattacggtgggtgaacaaattaccgtcgagcaattgatagaat

SEQ ID NO: 10621 - DNA, 433 bp, Triticum aestivum
  unsure at all n locations
  Clone ID: LIB31-019-Q1-E1-A11
attttggtaaggtgtgtatacacgagataagtgtggcatgtctaccttgatgtgttgaaccttcccatcactaggccatccgagaatgacacattggtggagtgatggataaggctccgttcgtttcagaaagatgacaaaagagggttcaactcctagatggcatgcatagcttagtgatacgtccattttgcatcatgcttttatactgatatttattgcattatgggctgttattacacattatatcatagtacttatgcctattctctcttattttataaggtttacatgaagagggagaatgccggcagctggaattctggattggnaaaggagcaaatattagagacctattctgcacaactccaaaagtcncgacacttcacagagcttatatttggaatatataaaaaatattgggcgaagaaag

SEQ ID NO: 10622 - DNA, 429 bp, Triticum aestivum
  Clone ID: LIB31-019-Q1-E1-A2
gggtcgacgaaggacatgaagacggcgaacgaggacgggggaatggtatagaagtcagcacgaacgaagagaattatttcaccccttcatgcgtcaccttaagtgcgacggagatcgatcaattcatcaagtgccttatgggaatcaaagtcaattccggttactgtgggaagataagcagatttctagacccccaagaataaaagcttcaactggatgaactcacatgactgtcacgtgatgatgacataagtactcctggttgccattagatggataatggagaagcacatccatgacatgcctaatggtctctgcaacatcttcgacattaactctcgatagtccataattgtgaagcagctccgaatgctatacgaagagatgagtgtcataatacgtgagcttgacatgtacgtactgcccgta

SEQ ID NO: 10623 - DNA, 450 bp, Triticum aestivum
  unsure at all n locations
  Clone ID: LIB31-019-Q1-E1-A3
attcgcgggccgacctcccaagcaagtcaccatctacgtcgatagatgggacgcctttgcctctatcaagtggtatcagatttccaggtcgctcggtgagattttacagtttttcgtagtttagatcaagtttgttcttcatacctatagtccacanaaaaagccacaaaaaaattagggttagttcatcatatccgaaccaatctaagcctttgcataatctttttagggttttgctttgttgaatttgcggttgcattgtcgtgtccagttgctggtcttagcggctagtcttttagagtttcgagttctggtcataagttgtcacgccgccaccgtaccatcatcatcgcccctgccacctaccaccaccgctccgaatccgtgtccatataccaccaccgattcgtatccatatactaccaccgctaccaacaccgctaccatata

SEQ ID NO: 10624 - DNA, 454 bp, Triticum aestivum
  Clone ID: LIB31-019-Q1-E1-A4
ccgggtcgactgccaccaaaacgatatccatcatctcatcgaaagacgggacacctttgcctctatcaagtggtatcagatttccaggttgctcggtgagattttacagtttttcgtagtttagatcgagtctgttctacatacctatagtccacgaaaaagccacaaaaaaaaattagggttagttcatcatatccgaaccaatctgagcctttgcataatctttttagggttttgctttgttgaatttgcggttgcatcgtcgtttctagttgctggtcttagagtctagtcttttagagtttcgagttctggtcataagttgtcacgccgccgctgcaccatcatcatcgcccctgccatctaccaccaccatttatccgccaccgctttgaatccgtatccgtataccaccacagctgtcatataccaccaccactgccatctaccacca

SEQ ID NO: 10625 - DNA, 429 bp, Triticum aestivum
  Clone ID: LIB31-019-Q1-E1-A5
gacctcccaggcaagaaaccaaactgatttttggtcacgcttgtcattcttcttaagcggtgctcaatgactctctcccatagcttcattgtatggctcatcagcttaattccacggtaattagtacaactctgaacatcccccttgttcttgaagattggtactaatatactccgtctccattcttctggcatcttgtttgcccgaaaaatgaggttgaaaagcttggttagccatactatcgctatgtccccgagacctttccacacctcaatggggatacaatcagggcccatcgccttgcctcctttcatcctttttaaagcctccttcacctcagactcctggatgcgccgcacaaaacgcatgctggtctcatcaaaggagtcattcagttcaatggtagaactctcattctccccattgaac

SEQ ID NO: 10626 - DNA, 436 bp, Triticum aestivum
  Clone ID: LIB31-019-Q1-E1-A7
gaccgacaagacgacagaaggggagcgatgcaaggtatcttggtgatactctgaagcttaaagttgcccagggagttgttggggcggtagctgacaaaagttctgttctgaagtttattccgtatacaatgcagtctgttaagcaaggattccaagatcttggtgcatcctctttgcagtcagctcaagatcttttacgatcggagactcttagattagatgtgatgaccggcgccgctcaagtagagggagggatccacaggctgatgtcatacgagaataaatcattctagcccccatctttgatcgacgacgggcatacaggttctctgcgtgtgttccatccaatgtcggcagccggtcacctgatattgtttgagagcagcctctcagcccgtctgtgagggccgttcgctcccctatcgatctaccacta

SEQ ID NO: 10627 - DNA, 392 bp, Triticum aestivum
  Clone ID: LIB31-019-Q1-E1-B1
ggtcgacattctccacaattcatacatcctatgtgaaccaagcccaaaagcatatgcgccgtacataccgtgctcatggacgcatcaatccttacatgtccaacccctgccacattgagctgatcttgtcatagaaggaagatcctgtgaagaaggaggctgacaacgtcgtcgcaccaaggaaagctatctaagctaacggagtggctgcattcgtccaagaatcttagatgtagttcttctcaagtatctttgttggcagtgtttgttgcctccttgatgtttttgttaccaacatggagttaggatttgttaaggttgatgctatccttgtgatcgccagtggtctttatatgcgaaaacagtttcagatatttgagcattagcccatc

SEQ ID NO: 10628 - DNA, 426 bp, Triticum aestivum
  unsure at all n locations
  Clone ID: LIB31-019-Q1-E1-B2
gggtcgacacggctcacaacgtcactgcatgcaaggataccttccgcgggcgtgtttgtgagtgccctattgtcaaaggtgtaaaattcgtgggggatggatataccaactgtgaagcttccggtgttggtaggtgtgagatcaacaatggaggatgctggaaagaaactaagaatgggaagacaatatctgcctgctcgcatgaagaatctgaaggttgcaaatgtccacaaggtttcaagggcgatggtgtaaaaagctgtgaagatattgatgaatgcaaagcgaaatctgcctgtcagtgcaatggctgcagttgcgagaatacatggggaagctatgaatgcagctgtggtggtaacaacatgttatacatgagagagcaagacacgtgcatcagcanacaagctgcctcctcagtcggct

SEQ ID NO: 10629 - DNA, 454 bp, Triticum aestivum
  unsure at all n locations
  Clone ID: LIB31-019-Q1-E1-B3
cggtccagctagtccgggtcgacaaagaacatgagctattgttggctgcaagggcttcaagggttgaaaaccaggatgccattgatgcttgcatggttggtatgctgctgatcctaaggaggcaagagctggcatcanggaagtgcacttcttgccattcaacccaactgacaagaggactgctctgacttacatcgatgccgagggtaactggcaccgtgccagcaagggtgctcctgagcagattattaccctgtgcaactgcaaggaggatgtgaagagaaaggtgcactctgtgattgagaagtacgctgagcgtgggcttcgttcgcttgctgttgcaagacaggaagtaccagagaaatccaaggattctcctggtggaccatggcaattcattggtctgttgcncctgtntgatcccccaaggcatgacagtgctgagaccatccgc

SEQ ID NO: 10630 - DNA, 443 bp, Triticum aestivum
  unsure at all n locations
  Clone ID: LIB31-019-Q1-E1-B4
gggtcgaccttgaactttgtgtacatgcccgtggacacgatgtaaatcttatcattaaaacttctttcaatttaatattccttttataagtgcatcttatatctgggatctgtccttttgcaatcgtggttccggccatgttctcctttaaataccgtttctcgtgcaagtttaagcacttgtcttctgcagagcaataccctagtccaaccaatactttgatctgtcatcgagtgttacactctggtatgtcgagattatcgtggaactgcataacttcttatggtttcttcatgaactgttatttctcaccaattccaattttcctgngttctgggttgtcgtcaaccgagaacaccaaatagtgaatcgagtccgcactctgattcaataactcgaagtaattttcgttgcttatgagtttaataatccttcaattcatc

SEQ ID NO: 10631 - DNA, 432 bp, Triticum aestivum
  Clone ID: LIB31-019-Q1-E1-B9
gggtcgacgactacaccaaaagattccgaagatactcttcggtgttctcccaagaacatctgctcatcgcctttgcaattccctaccaccataatatccttatggataactacgacatacacttgccattcatacaatcattccccgttgatcttgttattacaagataccccgaatttctctctattgttccgagaatacttgtacctagtgccttgtagttccttgccacggaaatacccctatggacaattccttgcacttatcgagtattcgatcatcccccgttgatcgtgtgtttcacaaaagttttcgaaatatcattcggtcttccgaaaatcctgagcagcctatcgctcttgagattcttgcttgcttgcattatggttaatcccataagtctagtaatcttattggcaccctttgtcacta

SEQ ID NO: 10632 - DNA, 402 bp, Triticum aestivum
  Clone ID: LIB31-019-Q1-E1-C1
catggcgtcttccaactccggcggcatccccatcaaggcggaacaggattcggatggctcggcccacagcacagctgatatgactgcttttgtgcaagatcttctaattcagatgcaaaccaggttccaaactatgtcagagaacatcattacaaggatacatgaatatgggtgcaagaatcgatgaattggagctgagcatcaatgacctcaacgctgaaatgggcagcaatgggatgacccctactaaagtgaaggacgaagaatcaaagccagcatacagctctgcctgatttaagcataagtagcagaagcaagtcgtattagtcttgggtccatgtcaatatcatcagccattcatcactaacttagtgcatgttatgagatgttattcgcactgtt

SEQ ID NO: 10633 - DNA, 280 bp, Triticum aestivum
  Clone ID: LIB31-019-Q1-E1-C2
gcgggtcgacactcaaccctatacctgcgtcgttacgacaccaacttcgcccccggaagctaaatgtgtttagccgtccgtccgtccgtccgtccatcggacgagatatgcatgtgtacttgtacgtcgtggatcaacgtgtagctgcacgtactttgtgtgtttatttgtaccatgatcgagcgagcgagaggtcctctcgctagctgcgcgcaatgtaaattaattaagcacaaggtgtgcacgagggaatggatggaagaatcgtgtgtcattactc

SEQ ID NO: 10634 - DNA, 423 bp, Triticum aestivum
  Clone ID: LIB31-019-Q1-E1-C3
actcaaataagtattgagtcgattgtcaactcccccatgaggcggctggggcggctcgtgcagggtggctgtgcgcaagtatcagggcagaggaactggttgtgcggggtggctgtgtgcaacgtttacgacacatcatcaacgttgtagatatagtgatagtgctcgccaggaaggtggctttggctgtttcatgtatctatttggtaaggctttgttagatagctacatataaaaacatatcaatcccacgcaccctctcaccactaggcaaaagaatttcaacatgtgatactagagcaccaatatagtacatgcaaccattgacctacaaaattttcacacataagtatgagttgattaatagataacacagaatcctaccacgaaaaacccaccacaacacggcattattaaataaaa

SEQ ID NO: 10635 - DNA, 419 bp, Triticum aestivum
  Clone ID: LIB31-019-Q1-E1-C4
caggtctagtactccgggtcgacgacttgaacgaggtggtggaagccaataaggaagaccgtgtgaggaaagcaatggaggcccaaacaatcattacccaagaactgaaacggttcgaggcatggagggactcactggagacggttccgaccatcaaaaagctgaggtcgtacgccgacaggatcagggcatccgagctcgagaagtgtctgcagaagatcggggaagacaatctcaacaagaagatgagaaggtccatcgaggagctgagcacgggcatagtgaacaagctccttcacggcccactgcagcacctgagatgcgacggcagcgacagccgcaccctggacgaaacgcttgagaacatgcacgccctcaacagaatgttcaacctcgacacggagaaggcggtccttgag

SEQ ID NO: 10636 - DNA, 422 bp, Triticum aestivum
  Clone ID: LIB31-019-Q1-E1-C7
cattcgccggccgacttctcgctcaacagcccccttggtggtggccaacctggaagagtgaagcggaagaaccagaagaaggcctcaggtggtggtggtgatgacggcgaggaggaagactaaccgctcaccctcaacccgcaaacttccgttgcagaattgttgaaattgccttgtggttcttgcaacggaaattgatccaacctttggtccgtctctaagaaccttagtggtgtaaagctttcgttgcttcagaatcatttggcaatcgatcctaaatttaaccatatgtttgtgggtttcgcttggttagtgactaccgcacagaagatgtgaactcagtgacgccgcctcgttttgtgtaacccacatgtctcgtgatacctatttcacacgcctgtctcagatttatttcactctac

SEQ ID NO: 10637 - DNA, 396 bp, Triticum aestivum
  Clone ID: LIB31-019-Q1-E1-D1
tgtaaaattttttaaatgagacgttggagtgatccacatacgcctgtcgattgcgtgtaagaacagtgagaaagaggcaatccgactgtatacgaccatcgagtcctacccctatgtatgcaagtttcatgtgaccgtccaaggttgcttggtaaaaggccacaatacatcgccccattcatcttcgcaacctctaaagcgcataagatggatcttgtgcgaacgccatgtgggacacttctcgggtgcataatatcgaccattccgccatcctcacaatggatcacatcattcaatttgtggacctttggaattgcatggcacagttccatcttcaaatggacgttgacgaccatatctcttaggtttgtggcaaatggagagtactccgtggcg

SEQ ID NO: 10638 - DNA, 427 bp, Triticum aestivum
  Clone ID: LIB31-019-Q1-E1-D11
cgggtccacatctcagacaagactcacgacgcgtaccggggcttcctcaactacatctacggcgacctgcacagcgaggagttcctcgcgcaccggctggccctcctcggcgccgccgacaagtacgacatcgccgacctcaaggaggcgtgcctcgagagcctgctggaggacatcgacgcccggaacgtgatcgaacggctccagacgggccatctgtaccggctgcagaggctcaaggacagctgcatcaggttcctcgtggacttcaggaaggtgtacgagatgcaggaggagttcagcgccttccttcagacggcggacagggacctggtggctgaagtgtttcagggcgttcttgcggcgtggagtggccggtgagccagtggcgtagctagcccaacgtgccagggtggtccatcaatgc

SEQ ID NO: 10639 - DNA, 442 bp, Triticum aestivum
  Clone ID: LIB31-019-Q1-E1-D12
gggtcgaccgctgaatatagatgggggaaggtgatgaagatgttggtgaagatgatggagttgttggagtagatcgctgtcacacaatgattaccccggcggtgttccgacgccaccaggagagagggggagagagcccccctccttcttcttccttggcctaccccctagatgggaggagagttccccctctggtccatggcgtccatggcggtggaggggcaggagccccttcgagattggatctccctctctcttcggttctatttcccgttccacagatctggccaaaaaccgtttcttaattatccggagattcgtaactccaattgcgctgagattttaacatgatttttttccagatataagtttccttgcgcccgaagtagatctccaacgaacgtacgaggagggcacaacccaccaccatgcgcctgggctg

SEQ ID NO: 10640 - DNA, 148 bp, Triticum aestivum
  Clone ID: LIB31-019-Q1-E1-D3
tccgggtcgacggccgcttttattatttttcttattattttttttttcaaaatgaagtgcaagccatggaattaccttctttgttacaatgagctcggcttctattgcatccacgcggcggacagcggcattaagcagctcttctttc

SEQ ID NO: 10641 - DNA, 449 bp, Triticum aestivum
  Clone ID: LIB31-019-Q1-E1-D4
gggtcgacctttcaggccaaaatggagtggtactcttggattgatatttcagcatgctggtgctcgtgatgacaaaggcaaccctatgatcagagatttctataacagccaattaactgcaagcggcaatccttatgatgacacgttacttgctaagcttgaaagtgtctacacagactctggagaccatagctctacaatgtttgttttcaacgtcgagcaaggtctgcccattcttccggagtggcttagtttcaacagagtgacagcccgtttgagacagagctatgaaattggtcctgcccgacttcttctaagtgcttctggaggtcatgtggaggggaacttttcgcctcatgaagcatttgcaattggtgggacaaacagtgtaagaggatatgaagaaggtgctgttggttctggccgctcatatgcagttggtagtggtg

SEQ ID NO: 10642 - DNA, 443 bp, Triticum aestivum
  Clone ID: LIB31-019-Q1-E1-D6
cgccggtcgacgacgaccgcaacacctgctcgagaccaagaatcgatcacaacatcactttgcaaaagagatcgctgctgtactttcctgacagcgcggtcgattaccttatcttcttcatcgactgcatcttcaactctaccttccaccaaccgaatagcatctacccgatcagctgcgaaggctttgatgctggtcctcgtcctggactatccttcgtgcttccggatgatgcagtgcccaccggcaactgggtgcaagcgtgcaaccaagtcatacaattgcctgtgcacaaatacggcgagatcaaccttactgaccctggatggacaaacgggagtggatatgccagtgttcttcgtcaggaattccagctgggatggaacgagagcgcgaatgacccggcatgtatccagtgcgagggatccaatcccaagggacag

SEQ ID NO: 10643 - DNA, 419 bp, Triticum aestivum
  Clone ID: LIB31-019-Q1-E1-D7
ggtgcgatctgtagctatctaatgctcgggcgggaaaaaaataaaacacatacgggctaacaaataaaacgaccggttcgatctaatctaactaaaccgagaataaaccgtaactaaaccgatctactaaaaaacctaactcttggctagatctaatctggagcgttggatatcgatctagcggatgaaggggaaggtggcttacagatacgttggcgacgtacggaggcgacggagcggcggtcagcgtcgaacagggcggcgattccggtggtcgcgggcgtcggtggagtggctgaacggatgcagtaaagcgagggcgtcgcgggggtggtggagttcgcgcttggagatgacggaaacgagcagggcgatagtgacagcggttgggcgctctgcagctccggtggtcggcgtac

SEQ ID NO: 10644 - DNA, 427 bp, Triticum aestivum
  Clone ID: LIB31-019-Q1-E1-E10
cgggtcgacgagtgtcagagcctacatgaacggtaaaacggcaggggggagcgcgcacctggagcgccctcttcttgacagcttgatgatcggaggagtaaatacatagcacaacatacagagcgtctcaaagataattttgatagcaagcagttaaccttcttccactgcatgtcggaatggtacacaaaccaagcaacgcccagcgagctacagacgcaggattcttcgaggtcgatgatgcaacgggaggatggccccatgcggtggtgactaattaggcgattgtaaacaaaaatgtttatagactcactgatgtccgtagccacgtaaaccacgagaaattgaaattctttctgagtaaattcctttgctgtggttgaaatgacgaggaagatatagcaggtcggaatgatcatgtccgttg

SEQ ID NO: 10645 - DNA, 442 bp, Triticum aestivum
  unsure at all n locations
  Clone ID: LIB31-019-Q1-E1-E11
ccgggtcgacactggctacaaagtgggtggtgggtgggctataaatttcttcgtcgtccgcgtcccaaccgtgttggccgtagtccggccagggctctcctgacaaagagaaagactttaacgaattcagggtgttgccgaaaggtgagtgctgaaagacatccgtggcggtgaactccatgaccggagcccaatcgggcttaaccgagagaggtgcgggatttacggagtccggcacctcggagtcacgggccttgcgagggactangctggtatccggctctatcgccgtagagattgcagtttccggggtggcgtctaaccatccgtcnccgattggcatagtgggctccgagctaatggtcggagcggacacctgagcgacgctctgggcgttgtccgatgacagagctaaatcgtgctcaacatgacagtgcggcgc

SEQ ID NO: 10646 - DNA, 413 bp, Triticum aestivum
  Clone ID: LIB31-019-Q1-E1-E2
gggtcgacactgctccctaaagagagtcggggtacacagcccagacaacaccctatcctgcctcgcaggagcgccgagtcactcggtgaccaaaagatctactctcgcgaggttcggttcagtcttcgcagctcgagacatggcggaagagaatgccccaattgcagttgacgctcaggttgcgggacctatcacagttcttggagagcccatcgtcctgatgactgctctgcagcttgtgatgaacaggtcatgcgctcatgaccgtcttgtcaagggacttcgggaaactgcgagcgcgattgataagcatgctgctcacatatgtgtgcctgctgaggactgagaacagcctgaatagttgaagctggtgaaggcactgtgtgcagatcacaacgttcacatggtcactg

SEQ ID NO: 10647 - DNA, 425 bp, Triticum aestivum
  unsure at all n locations
  Clone ID: LIB31-019-Q1-E1-E4
ccgggtcgactggcgcctcaagaacatctgagttgccacttgtagacaactttgaatgaaggcgttcgattgggtccctaatgatatgcttggccgcccgtgtattagtcttcttcaccctgcaaaaaaagaaagcatgtgaaaaaggtattaagaaatgaacaaaaaatatttgcaagggtagaaatctaaaaaagttgaagagtangtggaaagctagtagttgccatgtangtggaataagagttgccatgtgtcatagttagcagttgccatgcaaatccagcaagagttaccttgctagccaacttgaagaatgataaaaatgtctgatctgctaggaatgcaatttcaaaactaagtatgtgatgagcacacaagccaatgcaaagttggaagttgccataagggtacaaaaagagatg

SEQ ID NO: 10648 - DNA, 434 bp, Triticum aestivum
  Clone ID: LIB31-019-Q1-E1-E5
ctcgcgggtcgactgtcgtcccgattatgtctcatcatagacaggagggctttgctgtactaaaatgagccactcattccttgcaactatactagagtacatgcttttgataacaatttggggaagcctgtcaatgctgaagatgggcaagtagcatgatgtgtagcgagctggtggggaagtgccctgtttttctctgggccggtgccgtggaactggaatcaatgtatcgaatttcgtcttgtttctttctgaatttgggccagaagcctttgttgtaaggatcctcctgagtagtatgctttcatttttcttttcttgaacataaccgccaaatttgccgaaaaagggttttccctcactttgtatacaaagcaatcaaccgaacatccaacgataggtgctggggcggaagcagcacagtcacgctcgat

SEQ ID NO: 10649 - DNA, 411 bp, Triticum aestivum
  Clone ID: LIB31-019-Q1-E1-E9
ctcgcgggtcgacggctatcgccaaatcgagtcgctcagaggaatggtctgaatctggtgaccgctacgccggcgggacgaccgggcttcttagctgggccgtcatcctcgccggcctcctctgcggcggcgtcctcctcgtcgacaagagcagcgctctcgccggctaagagagcatctacgtgtaacacaaggtcgggtctctgcttgcatgcacgtctctgtaatctacgtatctacctcctgtgaatgtatgtcatcaacgatgcaaagtagttgattcgaagagatggtttatgtatgtacgtaacgcagttaccagatactcctacgtcctactttggaaactgtatcagggtatattcttggagcaaactgttgcgcgtcaacaacatctgaagacggccgctc

SEQ ID NO: 10650 - DNA, 461 bp, Triticum aestivum
  Clone ID: LIB31-019-Q1-E1-F1
gctaccggtcttgctatcacgggtcgacttccaccaaaacgaaatccatcatctcatcgaaagacggacacctttgcctctatcaagtggtatcagatttccaggttgctcggtgagattttacagtttttcgtagttgagatcgagtttgttcttcatacctatagtccacgaaaaagccataaaaaaaatttagagttagttcatcctatccgaaccaatctgagcctttgcatagtcttttctgtgtttgcattgttgaatttgcggttgcatcgtcgtgtcaagttgctggtcttaacgtctactccgttagagtttcgagttctgttcacaggttgtcacgtcgccgctgccgtatatcaccaccgcatcagcatcatcgctgctgccatataccagcaccgcaccgacttcatcgccgctgccatataccagcaccacatattcaccggcaatcc

SEQ ID NO: 10651 - DNA, 439 bp, Triticum aestivum
  unsure at all n locations
  Clone ID: LIB31-019-Q1-E1-F11
gggtccacgcaaggtgaggacatgtatgcaaccaatcaacatgcagatgttggttttttcctacataggctcagccaagcccaactgggacaagtatgcaaaagggaaaaaaacgatgcaggtaacctgtaacgcccaatatgcgaccatactccatacgtgtcgaggcacgacttggggcatagccgcatattggtatggtcacgagagtgtttgtatctttgcgcatctcatgtactgaatatatagaatacgagctttggcttacaatcgccacaatgtcacacaatatcatcaagttatacaatcattcaagatgaacacagtgtccagctacagacgaaatcaaatgaatagaaggcaaccacccaagctaagtcncgatcgaccctactgggcaacactactgatcatccggaaaggaaacatagtaacaacc

SEQ ID NO: 10652 - DNA, 448 bp, Triticum aestivum
  Clone ID: LIB31-019-Q1-E1-F3
gtgggtcgacctcagtctgcgtaaaatcagtcatcttatcgatgtcgggtggccgtctgtctgggtcaggatcgcgacccagtgggcaacagcaggtctgttcatctggtcccttgttgctcccctcctgttcccagacagggagttctagatcgacctggttacctgctagtgcatacctgctagtgcatcatctgattggagccacctacgtattgtatcgtatcgaacgtgttttggctgtgatggctaagctgactatctgtattctggtctgtaatattgtgtaagcaaacccatggcaaggagccggtgtttgtgtgacgttgtcgagtctggtctgcataatgtgtgacctaaggcattgttgccagtatttcaacagtgaagatacggtctttggttgcaaaaaaaatgaaacaacgaaaaaaaaaaaagcggccgctct

SEQ ID NO: 10653 - DNA, 420 bp, Triticum aestivum
  unsure at all n locations
  Clone ID: LIB31-019-Q1-E1-F4
cccctacaataagtcatgtgactactacaacgtgcaggccgatgacaacaacaagaattatttaaggaggatcccagccaggaggcctgcgcccctttcaattctgtatcccattttgtgcaacccttcttaaggcaaacttgtttaacttatgtctgtactcaaatattgttgcttccgctgactcgtctatgatcgagcacttgtattcgagccctcgaggcccctggcttgtattatgatgcttgtatgacttatttatgttttagagttgtgttgtgatatcttcccatgagtcnctgatcttgatcgtacacgtttgcgtgcatgattagtgtatgattgaatcgggggcgtcacaggtatattatattagagtcctgaagatatgcaagaagcaaagaaatctatgaaggaaaa

SEQ ID NO: 10654 - DNA, 424 bp, Triticum aestivum
  Clone ID: LIB31-019-Q1-E1-F6
caggtagggtcatgatctcgtaatttattaggattaaggaagcaatataaaatacacttgctttacaacctgaaaatattgacagaagctaagatttgatcctgtgctcacatagatgattggattgggcagaaatttggaggagtgtgcaaaatttcatctcatttggatactcctagctagtacttccttcacaaagccttctgtctgacaaaaactttgaaaatcaccgagggaagttggctaggcaaatgaggttgaattttggcatgaggtaattatttggacataaaaatgcccaaaaagtttgggagcaactagagaaagataaatgacacttccttcacaaagtgccgttcaggacataatagaaaaaggagtattggggaattatttttgaactggccaaggaaatgtttgggca

SEQ ID NO: 10655 - DNA, 436 bp, Triticum aestivum
  Clone ID: LIB31-019-Q1-E1-F8
ttcgcgggtcgacgaccactggccacctgatctataagcttggaggcattgacaagcgtgtgatcgagaggttcgagaaggaagccgctgaaatgaacaagaggtctttcaagtacgcctgggtgcttgacaagctcaaggccgagcgtgagaggggtatcaccatcgatattgccctctggaagttcgagaccaccaagtactactgcaccgtcattgatgcccctggtcaccgtgacttcatcaagaacatgatcaccggtacctcccaggctgactgtgctgttctcatcatcgactccaccactggtggttttgaggctggtatctccaaggatggccagacacgtgagcacgctctccttgctttcactcttggagcgaagcagatgatctgctgctgcaacaagatggacgccaccactcccaagtactc

SEQ ID NO: 10656 - DNA, 436 bp, Triticum aestivum
  Clone ID: LIB31-019-Q1-E1-F9
ctcgcgggtcgacatcatccaccatccacgagtgctactgttcatccacggttcacctccgccagcctccacctacgactgctcatccacgcactcctgttcatccagcctccagcactcctccaccggctactattcaaccagtcctctccacggggtcctgttcaaccaccctccacgggctactgttcaaccagccctccacggggtcctattcatccagccctccacagggtcctgttcatccacccccaaccggctcgatcagggtcctgttcatccagcggcaacggcctctactaccacggggtcctgttcatccaacccccactgggaactgttcatccaccccccaacaacgctcattgttcatcaagaggcagcaggttcgatcatcttcagttagcaccagtaacgaaggaattgctcgaccggg

SEQ ID NO: 10657 - DNA, 102 bp, Triticum aestivum
  Clone ID: LIB31-019-Q1-E1-G11
tacaccctgaggtgagtcgtattaatcgcacgacgggacagctttgcctctatcaagtggtatcagatgttcagattgcgcggtgagattttacagtttttc

SEQ ID NO: 10658 - DNA, 425 bp, Triticum aestivum
  unsure at all n locations
  Clone ID: LIB31-019-Q1-E1-G12
cgggtcgacgctgcacccgataatgagtcggaatatcctatgcctgatgcttctgagctctttacaaatgtctacgtcaagggtttcggcgttgagtcatttggcgcagatagaaaggagttgagagctacactcccataggtcaccaacctgaagatgaagacgagtactcttctaacacgatgatatatcgaggaggaataagcattggtgaacaaacccttgggtgttgctggcagtatttgttgcaaaacgaacctgtatagagatgtgatgtcaggggaattcgttccttatttgttatgttttcctttttttttctcttcctgcaattcagtttaactgctgctagctggcgatttggcctgcataatcgcttctgttcgcanaatcatgaggtggaaattaatgtttgcctgtgtcgt

SEQ ID NO: 10659 - DNA, 454 bp, Triticum aestivum
  Clone ID: LIB31-019-Q1-E1-G3
gggtcgacagacgccgtgaaattcagtcctactaatcgtacttgccaaatgttgtggcatacagtgggaggggcggtgatatgtaccgcgtgcacgacccgttggcttgtatcactcacgtgccgcttgcgtcatgggccccgcctagcgcgacaggagggagtgcacgcatgaacgtattgttaaaattcacaacattttttagaataatagttggttttgtttcaaatttaacaatgttcataaattcgatttttacagattgaataacatatctgtacgtttaacaagaatgtttgcaaattcaacaaagtccatgtgtttacgaattcaaaaaatgttggcgtgtccaaaaaatggccatgaattcatacaatgatcatgtagtcaaaaaatcttcataaattggaaactcttcacggattctaaaatgtttgtgaaggccaattaattt

SEQ ID NO: 10660 - DNA, 400 bp, Triticum aestivum
  Clone ID: LIB31-019-Q1-E1-G4
ggaactccctagaatgagtcttattatgcccagcaccatagacacaaccatagctggggccgacaaacctagtttagcgccacttggctaattcaaggcttttgaaatatctgaatatcctcctaggctaagaccaatactgcgagtatctatctgttttcagtatcatgtattttatgtttctcaaccatctcagtttcatgtaatagatagtggacactttaaaaatgttcataaaatgcaattttaaaaaattgaacacaatatctattcgttacacacatatgtatgcatattcaacagaataccatgtatatacggctgcccaaaaggttcgacgtttacttacgcttgcaagcaacttcaaacctcttcaagtgtttcaccaaatttcaattaa

SEQ ID NO: 10661 - DNA, 450 bp, Triticum aestivum
  Clone ID: LIB31-019-Q1-E1-G5
tcgcgggtcgacgaaagttcccatattcagtctaatcaatgtttcgattttgggaaggttctagagccttttcacaccggtttttaaaaaaatcattttgggttttcttctctttttctctttttcatttttatttattttcattttgcggtcatctttaatattcgtgaactttttttgaatttgttaagattattaaaattttaaatattttcgaagttctgaacattttttgaattcgtgatttttttatattgtgatttttctaaaaactgcgaacaatttttgagtttgtgaatgttttacagaactgctaaaatttcaattttaacatttgttcaaataatgatcaattcttaaattcttgaaactttttgagattgtgaccattttttgaaatatgacaacattttatgattttttttaaattcaagaacattttttcgaatg

SEQ ID NO: 10662 - DNA, 439 bp, Triticum aestivum
  Clone ID: LIB31-019-Q1-E1-G6
ttcgcgggtcgactaggcaagttatttttagggattccgccaccgctagagtaccttgctctgcaattaagagggggtcagatgtggattgaacctgttgccattcgcagccagcttaatcatctcaagaaactgttcattgcaaacgtggcaatgaactggggtacattctggattctcaccctacttgctgccgcacctgccttggagtcgctccatgttcattttgactcagagaaggcgagtgcttcagtattactagatgtgcaagcggaacaccatcagcaccactatcacctgaaagaactcatggtcgttggcttcaacggggtggcatggcagacgggctttgtgaagcggatcatgcaggcatcgccgatcctggagcatgtccacctgctggacgggcacgtcgtggaggatgaagaacggcaactcg

SEQ ID NO: 10663 - DNA, 405 bp, Triticum aestivum
  Clone ID: LIB31-019-Q1-E1-G9
gggtcgactgcgagcaccaacaggtagacctcacagcagtcccacggcgcatcagaatccacacccgcacccgcgccaaggagactctttgggcagtggatcggcctcggcaggtcgtcgccagagaatagatcgcccgagggctcatcgtatcgacaaatgcactctcctcggatgtagccagccccctgcggaggcaacctaagttaaaacttcacatttggaacctgagttgcttgtaagaaaagatgggggaaaacccatctgtaaggaattaaaccgggtttgcgcgctgaacttccggagaattctgcgaaggagaaacaggaaataacccggagggaaaacgttttggtttggtttaaaaaaaaaaaaaaaaaaaaaaaaaaaaaaagcggccgctct

SEQ ID NO: 10664 - DNA, 373 bp, Triticum aestivum
  Clone ID: LIB31-019-Q1-E1-H10
gggtcgacgccacgagggaaataaagctgctgtcagaccatctcacatggggctggtaaatgtcggtcgagaaaattaaatttcggtcaaatttccgatatctcaccttggctaggtaatgtcattgtcggccgagaatatcaaatgaaactttgtaagttgtactaggctacttagactttgaactaatgtgtgatggtcgtggattgtacgtcttgaactaatctgtgaaggttaccttggaaggttaacttttgtttcgcttgattcctagaaaatttggaaaatttccatcatattttgttcaaaaactcaaattttggctctcatattccatctgtgatatctatttatatataaaaagtaaatgatg

SEQ ID NO: 10665 - DNA, 431 bp, Triticum aestivum
  Clone ID: LIB31-019-Q1-E1-H11
gggtcgacaccatgccatacactcacatcggcgaggaaacacctgacgtcattgatcttcggaagcaacagaggaaagagtctgaaaggccaacagataagcagttataccaggttcttgagcagaaggaggagaaaatcgcacctggaaccctctatgggtcaagccatacgtatgtggttggggcacaggataaggctggggttaaaagggttgatcttctcaagaatcaaaagtccgacaaagtggacgtcaccatacatcccgaggagctcgaggttatggacgatgtcctggcagccaagtatgaagaagcccgggaggaggagaagctccggaaccagaaggaagacttcagcgacatggtggcggagaacgcgagcaagaggaagaggaagcacgagaaggaccggaaatcttccaaaaagaaa

SEQ ID NO: 10666 - DNA, 387 bp, Triticum aestivum
  Clone ID: LIB31-019-Q1-E1-H12
ggtcgacggcaccataaaaccttccccttttcagacaaacgatgacgcacaaaatgagcatgctcatctaaagatttcccatcaactaggctagttggggtttcagcacgagcgcataaggatcgaagaagatccaagtagaacactttaagtggatccatatcaatagatttttagcaagcaaagatgaaagcacatagaaggcatatggagacacgagcaaacaaaaagacaagcaaaagagaggagattgggaaagagagggcaaataaaacggcaaaggtgaagtgggggagaggaaaacgagaggcaaatgggaaataatgtaaatgcgagggagatgagtttgtgatgggtacttggtatgtcttgacttgtgcgtagacc

SEQ ID NO: 10667 - DNA, 417 bp, Triticum aestivum
  Clone ID: LIB31-019-Q1-E1-H2
cgacacagatccctaaactgcgtcgtaataacattttagtactcacactttttgctgatgacttcagatctgaacctacggatatatgtgtggacctgaaaatgaaccgccagatgcttaaaccatattatgaccagctgggatgcaagtcggtgtcaacaggtgcttttaaaccattttttatgacgcttccagcacccctcaagttcccacaacaagtcacaaggagaaggcggcgaaaataaccatctcagtattggtttccatttgatatggttgtgataggaaaggtatgcattgccaccgtcgaaagaacctatgtgccctcagctcagtttcaccaatgtagtggagaaaatgatgacggtggttgttctgtttttgttttctattgtcgcttgggaattgctacaagag

SEQ ID NO: 10668 - DNA, 438 bp, Triticum aestivum
  Clone ID: LIB31-019-Q1-E1-H8
gacgtcacactgtaaaccgtctccaactcactcgcttgacgactacttcttggtaattcagtcaactatctgcacatgtaattaagaagaccaagaagtgtacatggatctgaatggagaagaggatgaggattgcgaatgacttgtgcatcttccatgatcagaaccggatctgtttatttttgcgtgatggtcgtggtctcacttgtatggttgcatcgtccatggtcagaactggatctgtttatttttgcatgatggtcgtggtccgacttgtatggttggttggtagtctttgtttgcatggttacatggttgaatattgtacaatggactaattgtagtgtatatgtgttgtgtcatactgatagtttttgtttgcatggttgaatattgtccaaatggactagttacagtctatatgcttatataaatgat

SEQ ID NO: 10669 - DNA, 416 bp, Triticum aestivum
  Clone ID: LIB31-019-Q1-E1-H9
gggtcgacggcacggttcatgtttcgtgggtccagcctagagtacttggcatcccacaggtgaaggcgttgcgtgagcgcctggactcgtgggtcggcaaagtgcataccacactgttgtccatcgaggcagagacccccgatctcgtggcggcttagcttgttggccaaaaatgattctgaataggctttggttgtcagcaaggcggcggtgtaaaacgagagaccatctggctgtgctgcgcgtgctagctgctcttttcttgataacgaaaacttgttgccttgggtgtcctattggtctggacttgtaacttccttctatcatcacggatcgaaacagagaaatcataccggcagagggtgtcactagttttttcctgttgaactttataatctgtaatccagcggtttgtc

SEQ ID NO: 10670 - DNA, 356 bp, Triticum aestivum
  Clone ID: LIB31-020-Q1-E1-A11
attctagggtcgaccagccagcaaggagacttactgctgaatcgcatacagaagctgtcgcgagtcattgacctgtaggctttctttgtgtggaggtttggagcagctccttggcacaaccctactcgagcttcccgagcgagacttttgctttggttcctgcgaaatactggcagtattgcattttgcgtttcaaatcggtcaagggggaagtggggtagggcttttttttcttcaaaatctgagtatttgacttgtaacctaactatgtggatcgagggaactgcagaccattgtttgtagacggttgcttccacgatgatgaattcatccatttattacaagtctgtcgaaaa

SEQ ID NO: 10671 - DNA, 423 bp, Triticum aestivum
  Clone ID: LIB31-020-Q1-E1-A5
ggtcctagactcccgggtccacctgggtcgagcactccgtcgaacaggtgataggcaacatcgcgatgcagaccggggttgcatcatgggcgaccttgggaatctccagggccttcgtggtggagcaggagacgttggggacgagcatggacgaggtgtgcgtcatggttgacgctgccggatcgacaagcgaggtaaccacatgagggtcaccagcgcttgcaacacccaatagtgcgctcatctcctctgccttagcacataatctcttgtgataccacaacaactgctcgttggcaggcatggcatcccactccggaggtaagtcggcaggcatgtcgtcgtcgccggtgaaacggatgaatcggtgtgggagaaaaaatggggaaaattggatggtgaaaaggtggtgggctggctctg

SEQ ID NO: 10672 - DNA, 374 bp, Triticum aestivum
  Clone ID: LIB31-020-Q1-E1-A7
cggtcctaaactcccgggtccacgatagctagacagagcaaggttgatgcatcaatacagttctgaagatggagcgatggcagttggcggcggcggcctctcagagcacgccggaccggcgagacccatgcccggcaggcgtcctggatgggttctcaggtcttagatgttacgtttggctgcgatgtctgtttggtattatgcccaggctatctgcgccccttcatcaactggataagtgtaccaacagtttgttacttagacggcagctttagtcttactgtggtattactttgtaaggtcttgttacaataattaataaattggccttatccatcgtccaaatccaaaggccttttgtcttcccccttttc

SEQ ID NO: 10673 - DNA, 428 bp, Triticum aestivum
  Clone ID: LIB31-020-Q1-E1-A9
gtcgacagacatgacagaccagatttgaccaaaattcaaaaaaactgacataattatttagtaacattaatattcttgaataattatttagtaacactaatactttttgaataagtagtttgaccatagtttgaccagatttaacaaaaataaaaaaaaaattaaaatttgagcataacttttttccttttagaacttgagaattctaaaaatttgcgaaaagggaatgtcatgggaatggagatctgccgcgccggtattagactagtcgattagttgaagtatgttcaacattatacctccagagtcggacaagctccgcttttatttgaagtatgtaggaaatgtaattccgtccagttagttcaaacagtggtccaaatgtatgtgggttctcttggatagacagctcccgcatcagtatccct

SEQ ID NO: 10674 - DNA, 449 bp, Triticum aestivum
  Clone ID: LIB31-020-Q1-E1-B11
gtcgacttccaccaaaatgatagctaccatctcatcgaaagatcgggcccctcgcctctatcaagtggtatcagattttcaggttgctcggtgagattttatagtttttcgtagtttagatcgagtctgttcttcatacctacagtccacgaaaaagccacacaaaaaattagggttagttcatcatatccgaaccaatctgagccgttgcataatctttttagggttttgcattgttgagtttgcagttgcatcgtcgtgtctagttgctggtcttagtgtctagtcctttagagtttcgagttctgttcacaagtagtcacgccgccgccgtatcatcatcatcaccgctgccatataccaccatcatcatcaccgctggcatatgacaccatcgtcatcaccattgccatatgacaccatcatcatcattgctgccaaataccaca

SEQ ID NO: 10675 - DNA, 405 bp, Triticum aestivum
  Clone ID: LIB31-020-Q1-E1-B12
gtccacacagcttgttgccagataatcttctgtgtgaaaggcatcaagcttccatgcgatggatggcttttgcaaacccgacatgcagctatgtggttcatgccaacaacaaatatgcacaacttgattcgtgctgatatctagactgagccatgtattttgctgctgtagcacgaccctcttttgttgggtattatgtactgttgttagtttgaagcactcatctggtttgaaggatagtagataccttcctaggatcaagtgcatcctcactcacctgcgtaggatgtactgataatgatgatggagatgttgtgcagaagcctaatatatatatatatcagttaggcttcaagtgcgtacttgttagttaaacctatgtatacattgtgacactaaatacga

SEQ ID NO: 10676 - DNA, 458 bp, Triticum aestivum
  Clone ID: LIB31-020-Q1-E1-B9
tagccgtccgagattctagggtcgacatgtctatatcagtataaaaatggtacatggtgttcctgatgctattctttcttattttctgaaggagaggctggcatttgacaatacggttctgtgtgtgaattgactactggtactgcagcctgaaatttttcttgtggagcggaccgaagtaatccatcaagctagctgcattattttggcaggacatgtccgaagaagacatatatgcatgtgggtacatggatatcggcgagagggacttgggcgaatatgggtcatcgcccaaaaggaagaaacttgcagataacaatccaaagaaggcattggatttcggcagtagtgacgagcctcttcagtaggcttttggtttttctacaatttcaagctttagagctgaactattgtcccaaggtagtatttacattattttcgaaccaacaatcacttca

SEQ ID NO: 10677 - DNA, 436 bp, Triticum aestivum
  unsure at all n locations
  Clone ID: LIB31-020-Q1-E1-C10
tagccgtccgagattctagggtccacgctgtggcggcatcagcagctaactgactgaatcgctagctagctacttcgacgtactcacctcatcatggcgtcaaacacatgcctgaagtcgaaccagcttcctgttagaacaacaaattgtactattcctttgtactcccacctgccgtccttttggctttcggatgatcggtaccaggtattgaaaatatactattacggaaactaaatttgatgggccgtgtcctctgttgtccttctgtggacctcccattgattaatctccttctaatctgatcattggattcttgaagtggcaatgtcaagctctcatcatgtgagtactcagtcggtgattcnctctactagtggtattttatcncaaagaataacacaacgtactgtgcatcaggagcgtctacagatat

SEQ ID NO: 10678 - DNA, 466 bp, Triticum aestivum
  Clone ID: LIB31-020-Q1-E1-C12
attctagggtcgacggacctgtaggtcggcatagccattgtggagtggcagcagcagtatgcagggatagcaccgggctttacctgggctcttctcttgttgtgtatgcaggtattattgacccgactcttctcgaagcatttgcgtgtagagaagctcttgcacttgcagaggacctgagaattcagatgatgcacgttgcttcagattgtgaggaagtggtgaaggacattaagcaagggtcgggaggatatcatggtgccatcatccaggaaataattgctaggaaaaatgatatgatttcatgtactttcactcatgaacgtagagtttttaatttcgaagcacataatctcgtcaagtttggttgtaatttacgtgtaagtcgtcatgtatggttggggtctcctcatgatcaaaacattgtacctttaaatattgagcagttaaagacgtgagaattccc

SEQ ID NO: 10679 - DNA, 392 bp, Triticum aestivum
  Clone ID: LIB31-020-Q1-E1-D11
gtccaccaccctattatcagtagtattcccccatgtatatagtagtagtctaagtattttgtaacggtagctagatcaattgtatgcccttgtttgaattgagtggtgtgatatgaatgtgtttgtcccatgtgcatatgggtagtgatttttttctccttagaccccactctattctaatctgtcccctctaaaacctatcagatgcctccgacacgtcaccccggatttgtcttcccaccgaagctcacccagttcatccagcagcataatgccttgatgcagctgctagtccacaaccaacgcaacaacagtaacaaccacaaccatcacaatccaccgccatcacttcccgtagatcacttcacccgttttctgagggttaatccgcc

SEQ ID NO: 10680 - DNA, 418 bp, Triticum aestivum
  Clone ID: LIB31-020-Q1-E1-D2
ggtgggacgtcccctaccgaaaaccatcatgcttgttgtgagaagctccggtttctgagaagcatatacccaaacctgccccaaatgggacaaaatttgtaccacggcatgttgatgccgctacgtgatagcatgccaagtttcatgaatttcagacgagttttggttttactagcatttaaaaaccaggcacctcaatgttttgccggcaatcaacggtgccctggtgtttgaaattcgttcccatttcttgcatgggacctaagcatgcacccaaggacgctgatttgatttttcaaccaatttatatgcactggagcatgcgcatgtagttcaaatttgaattatgcacataaatgcattgaaaactcagttaatgcataaaaatgtcccaaacgaacccgaaaaatcataaaaa

SEQ ID NO: 10681 - DNA, 462 bp, Triticum aestivum
  Clone ID: LIB31-020-Q1-E1-D5
gcctgcccgatacggtcctagattcccgggtccactccctaccttgaaagtggctagtcctatttatagagcgaggccctgatcctcttcccaaatattgagcgggaagggcaccaacaattggccattttgaaggggaacatctagtacacttatcctgactaaagttggtcctcgcctgccaaaggctctgacgatgacgccttcctgggctccacgatgacctccatcctgccgttctgctggtcttggtcttgttggaccgaaatggtaacctttgcctgatgccttggcctgtgcttgccccatttgcaccgaaggggaaacaaggacactgcccaggccggcacccacctggcttgggtcgtcatggcttgcatcacgggcacctcatgatgtaccccgccttgatctctccgcctcctcgcgagctagcctgacgaggctgcacctgaggaagct

SEQ ID NO: 10682 - DNA, 415 bp, Triticum aestivum
  Clone ID: LIB31-020-Q1-E1-D7
catgcaccatggagtcatgtgagttcaagggtgcatacaaccagttgaggaagcacgtcagggaggatcatcctgcggtacgaccaacggaggtggaccccaatcgacagcgagactggcataggatggagcagcagcgtgatcttggggatttgttcagcatgctgcgttcggggatcagtggcagagaagatggggttggagtcagtgaaggtgacgagggcgtcagtgagagatccttgcacgccacgtccataacgatggtcttcattgtgcggtcaggcaggtccatcctacactacacagacggggaaatcccaggtcgtcgatcaagaacaattcttctagttggggagcctcgtggtgaagcctcccgaggaggaggatcaagcggcaatggtgatgctgaggccac

SEQ ID NO: 10683 - DNA, 363 bp, Triticum aestivum
  Clone ID: LIB31-020-Q1-E1-E11
gtccacaccgaatttcacacagcgggagatctcgttcctgctgaggctcatgcccgagcttgtgcaataacacagattgcacaccattaactcatggctttggatgtaaccgattgtttggcaaacaaggcaaggaggaccccttgtggaaaggaatacaaggttacaaactgggttggtgtgaagtccttccgtgagccctggtactgggaaaattggggaatgatatgatatgttgtaatgtgggtggcgaaatttttggataaacatgttgtaatgaatgtcaccgtcacaatgggccgtgttaccaaactaatacatgatcctgaatctggtaaccagcattttccaccaaaagaaaaa

SEQ ID NO: 10684 - DNA, 417 bp, Triticum aestivum
  Clone ID: LIB31-020-Q1-E1-E12
gtcgacatccaaccagatgcgcatgtcaagcaggcgatgaatgagatcaatgcagctgcaaggatgagggtggctgcaaacgagaaggcggaggctgagaagattgtccagatcaagcgtgccgagggtgaagcagaggccaagtacctgtctggcctcggtatcgcccgccagcgccaggccattgtggatggcctgagggacagcgtcctgggcttctcagtcaatgtgcctggcaccactgcaaaggacgtgatggacatggtgctgatcacccagtactttgatactatgaaagagattggcgcgtcctccaagtcctctgcggtgttcatcccccatggccctggtgcggtgcgcgacatcgccacgcagatccgtgacggtcctcttcaaggccagtctgcctctgacaac

SEQ ID NO: 10685 - DNA, 398 bp, Triticum aestivum
  Clone ID: LIB31-020-Q1-E1-E4
attgaagagttgaatgctccgagcttctatccttctcttgtatcactttgggtaaatgattcctttgagaggaaagatatggaaagagagttgttggcaaagctctttgtcgggctttacaacggtggatataatttattgagcaagcctcagctcattgaggggctttcatctgttcttgcttcattggaagatgctctaagtgattctccaagagcggcagagtatcttggacgacttcttgcaaggtttgtggtggagaagatactggttttgtaagacgtaggtaaattgattgaagaaggcggagaggagcctggacaccttgtgcaggaaggcattgcagctgatgtccttggggcagtcttggagtggatcaaaacagaaaagggggattc

SEQ ID NO: 10686 - DNA, 419 bp, Triticum aestivum
  Clone ID: LIB31-020-Q1-E1-E9
gtccacagccgcattggcatgaccaagtcggacctcgtcaacaacctcgggaccatcgccaggtcggggaccaaggagttcatggaggccctcgccgccggcgccgacgtgtccatgattgggcagtttggtgtcggtttctactccgcctacctcgtcgccgagagggttgtcgtcaccaccaagcacaacgacgacgagcagtacgtgtgggagtcccaggccggtggctccttcaccgtcactcgtgatacgtctggggagcagctcggcacgggtaccaagatggtcctctacctcaaggacgaccagatggaataccttgaggagcgccgcatcaaggatctagttaagaagcactccgagtttatcagctaccccaactccctgtggactgagaagaacactgagaaagaaat

SEQ ID NO: 10687 - DNA, 409 bp, Triticum aestivum
  Clone ID: LIB31-020-Q1-E1-F10
catcttttatgatttgagtctttgcttattagtttaccacaatcatcctttctgtacacaccttttgagagagccatacatgatttggaatttgatagaatactctatgtgcttcacttatatcttttgagctttatagttttgctctagtgcttcacttatatcttttagagcacggtggtgtatttgttttatagaaactgttgttctctcatgcttcacttagattattttgagagtcttaacaacatggtaatttgcttaaaatcctaatatgctttgtatggaagattaataataaaactttcatatgagtgtgttgaatactaagaaaagtttgatgcttgatgattgttttgagatatggacgtaataatatcaaagtcatgccagttgagtagttgtgaaa

SEQ ID NO: 10688 - DNA, 477 bp, Triticum aestivum
  unsure at all n locations
  Clone ID: LIB31-020-Q1-E1-F11
gtagccgtccgagnattcagggtccacaatgccaaaagggttaaaactgcgaagttggtggcagttttggacatcggttttttcggggttgtgttcgcggccacaacattcgccattggagggcttgacatgaaaatcatggttattggattgatatgtgcttgccttagcgtgttcatgtacgggtccccactcactgccgtgagaacggtgatcgcctcaaggagcgtggagtacatgcccttcttcctctcattcttcctcttcctcaatggaggagtctgggccacgtatgccatactcgacaaagatgtcttccttggggtccctaatggaataggctgcttcttgggcggcatccagctggttatctatgcaatatacaggaacagtaaggtccgctctcagtctcatgacagtgacgaagcagcatatgatgcttcggcttctcttctgtcctctgatgccggcagacat

SEQ ID NO: 10689 - DNA, 456 bp, Triticum aestivum
  Clone ID: LIB31-020-Q1-E1-F8
ggtccaggactcgcgggtcgacttccaccaaagcgaaatgaccatctcatcaaaagacgggacacctttgcctctatcaagtggtatcagatttccaggttgctcggtgagattttacagtttttcgtagtttagatcgagtctgttcttcatacctacagtccacgagaaagccacacaaaaaaaaattagggttagttcatcatatccgaaccaatctgagcctttgcataatctttttagggttttgctttgttgaatttgcggttgcatcgtcggtctagttgttggtcttagagtctagtcttttagagtttcgagttctggtcataagttgtcacgccgccgccacaccatcatcatcgcccctgccatctaccaccaccgctccgaattcgtatccatataccaccaccaatccgtgcccatataccaccaccgatccatatccatata

SEQ ID NO: 10690 - DNA, 301 bp, Triticum aestivum
  Clone ID: LIB31-020-Q1-E1-F9
gtccacaatcgtggaaataaacaaggttccctatcattcccggatgataaacggggattcatgagatttccctatgtcaatcagggttacactctagatcggtaagccaagtacagtttaagaacaactggagccagaatcctaaaaatgggtcaactgcagagaagatgatgcaataattaatgggccttaacaagccaagggccaatccagggaagaacaaaatgcgccaacaagttctggtggaaccaaaatataagttatgttgtatcctaattccctttttttgccggggaaaaca

SEQ ID NO: 10691 - DNA, 458 bp, Triticum aestivum
  Clone ID: LIB31-020-Q1-E1-G10
ggtccacaccttccacaagagtgacacgatctagggcagcgctggggaccggcaagtcgcgagttcttacctcgaaggcgtcattctggcaaaccaagataaggataacttcctcgtgccttactttcccaagtaagtcctcccctcaaccggcccgtaacatataaattcttagatttcgatcgtttttcttttagcattcagtgttttctacagtgacacacattgcacgctcatcctcctaagccccaaatattccatggccacatatttcgacccggaccgtcagtccaacgtagactacacaaatgtcaagaaagttcttgatgatgttctccccggctacgccaaatctggaggcaccttcaccaggcctaatcgtaagtacgggaagcaagtgttctcccacaatacgacgttctgctgcgtcaagcagccgcctgacggtaagaagggtg

SEQ ID NO: 10692 - DNA, 443 bp, Triticum aestivum
  Clone ID: LIB31-020-Q1-E1-G11
tccgagattcacgggtcgacagcctcgacaccgtaggcaccgtcaagacaaagatccactgcatggagggcttccccacaaacctgcagtgcctcatcttcaaaggcaagcagctcgaggacgacgagcgcacgttggccgagcacaatatacacaaggattccacgatccttctcgtcctccacccacgccccagaggtgggatgatcatcttcgtgaagatgttgatagggaagaccctcactttcgaggttgagagctcagacactgtcgagagtgtcaaggtgaagatgtaccagaaggaaggtattcctccgatacaaacacgcctcatcttcgccggcaaggagctggacgacaagcgcaccctggcggagtacaagattcagaaggaggatacccttcatcatctgctctgcctttgtggttgttgatcgagatgc

SEQ ID NO: 10693 - DNA, 415 bp, Triticum aestivum
  Clone ID: LIB31-020-Q1-E1-G4
ggggcctctgttggggcttcaaataaggctcagacagcagcactaatttctcacggatccttagacctcaaagatgatttcagtgagcaagaggagcagctgcggcagtttgacatggacatgaagtttggcccatgcatcggtgtcaaccggcttcagcgctgggagcgtgcttccgccatgggcctccagccaccgccccaccttcatgatctcctagcgcgtgcctcctccggaaacaaccgcaacaacggcggcccctcccctgagtgcctctgggagggtaagatctagaatcaagtttcttccgccaagagtgttccatggcaacctagcaaggcttgcctactgtttgggaccatgtagtttagtctgaaacttttaccgcgcgaaactctcgctgttgtactgaatc

SEQ ID NO: 10694 - DNA, 458 bp, Triticum aestivum
  Clone ID: LIB31-020-Q1-E1-G5
cgcctgccggatacggtcctagattcccgggtccactccgcctctgtacgtcgagcaactgaaggtggaccccctcgagagctcggttgtggcattaccaccattaccacccctcgagcccagccagatgctcgactccgagaagggggattccgacgttgcaatgtcttgctcgtccgtgtccattgggcaagtggttcctgtaggtgatatggttgtcgcacccagagcattggctcgtgtgcctggggctctcatagcaaaagagatttgtcatttcctcgctaccttggacgctgctaaccctggatccggcaagacgattgggtgtctccttaaggagaaggccatcagggataagaaaagtggtggtgctagctctcgtcctgtcgtctttaaggagaaatcaaacaagtgcagaaccaagaagagtggcgctatagaaaaggcgtccgtga

SEQ ID NO: 10695 - DNA, 416 bp, Triticum aestivum
  Clone ID: LIB31-020-Q1-E1-G7
tacaaaaatacttatcgggttgcatggtcattagttaccatcaaaaaatgcataaaagacaaagaaaagggctacaattactagaatacgtctaaaaaaaagcatacctcatcactgcagtttggtgggacatgcacatgcatgaacttcccaagaccttgtaaaaccgccaaacaagcaaaaatcgacgccaaactggggtttcaactggtgaattgttgagaatgaaaatgagtaaggaaaagtataaatagacaaatgcatttccagtaagtacatgaactgattagaaggaaaagaaaaacaaagttaccggtagtttcccataagaaatttcgtctgcttggacatccatactaagcaattcagatatcttctcttttttccaaacattgatagcaaatgcaccatcgggc

SEQ ID NO: 10696 - DNA, 384 bp, Triticum aestivum
  Clone ID: LIB31-020-Q1-E1-H10
ttcacgggtccacgacttgaaagaagtggtggaagccaataaggaagaccgtgtcaggaaagcaatggaggcccaaacaatcattacccaagagctgaaacggttcgaggcttggagggactcactggagacggttccgaccatcaaaaagctgaggtcgtacgccgacaggatcagggcatctgagctcgagaagtgcctgcagaagatcggggaagacaatctcaacaagaagatgaaaaggtccatcgaggagctgagcacgggtatagtgaacaagctccttcacggcccactgcagcacctgagatgcgacggcagcgacagccgcaccctggacgaaacgctggagaacatgcacgccctcaacagaatgttcaacct

SEQ ID NO: 10697 - DNA, 440 bp, Triticum aestivum
  Clone ID: LIB31-020-Q1-E1-H4
cgactatgcggcccaagtcatggccggtctcgaaagggtcctcgatgcagatcagatggcggtcgtttccgatgcgagtcgtccagttcttctccttcttgctacatgtcgttgcgtcatcacaccaggtgagaaaaaatgtttaaaattcttataacctagatgaattaagtcgatattgaattcttggtttggaagaagaatgctggtccttaattacctacctgattatctttcccatacggatggagatgacatctttcctgtaatcgtgctggaatgcccagtagtggaaaaatgcccagagtaactccgcgatggtctccttgttttcagccccaaaatcacgaagctgatgaacttcgtcgaaataagcgcattcagtgtcatcaacaaccatggtatatgtgggctccatagcctgaaaatgtggggaaatg

SEQ ID NO: 10698 - DNA, 404 bp, Triticum aestivum
  unsure at all n locations
  Clone ID: LIB31-020-Q1-E1-H9
ttcaagggtcgaccaggctgagaaaatgggacttgactacatggatgttgaaagtctcaagaagatgaacaagaacaagaagcttgttaagaagctagccaagaagtaccatgctttcttggcatcagaggccataatcaagcagatccctcgtctccttggccctggtcttaacaaggcaggcaagtttcccactctggttagtcaccaggaatctcttgaagccaaggtcaacgagacaaaagctacagtcaagttccagctaaagaaggttctttgcatgggtgttgctgtgggcaacttgtcgatggacgagaagcagatccaacaaaacatccaaatgagtgtcaacttccttgtgtcnctcctgaagaagaattggcagaatgtgaggtgcctgtacg

SEQ ID NO: 10699 - DNA, 414 bp, Triticum aestivum
  Clone ID: LIB31-021-Q1-E2-A12
cgggaataccagctagaagatcttgaaattgtttcagctgattatatgctgagggttgcagtttctaactttaggaatgcctgggagaatatggacccagaaagtgagcgtgtggatgagtatggactcggggctagagagagcttggctgaggccgtgaatgctgtcactagtatccttggcatgcaaccgtgtgagggcactgaggttgtaccaagcaatgcaagatcgcacgtttgcctgctgtctggggtgtatatggggggcgtcaaggttcttgtcaggttatcatttggactaagcgggcccaaggaagtggcgatgaagctggcggtaaggtcagatgaccccgaagtcagcgacaagattcatgagattgttgccagtgggtaaaacggatggcggcatctgccc

SEQ ID NO: 10700 - DNA, 293 bp, Triticum aestivum
  Clone ID: LIB31-021-Q1-E2-A2
tccactgtggccaatggagtgatgaagatgtactgtagagtacatattcaagggaactgtgaggtgacttagatagctgtaatgagctgatggagcctttgacctgaagttatatttgtatagattacatgatttgttgatgaagataagaaagaagaactgatggcaaacaaaccgaggaaagtcaccgaagaatgaaggtgggtgcgatgccacatcagaagggatttaagctaagggtgaattaagggccatggagccaacccataagaaggtccaataaggtgcataca

SEQ ID NO: 10701 - DNA, 420 bp, Triticum aestivum
  Clone ID: LIB31-021-Q1-E2-A5
ccgggtcgactttgtgttgataaccgtccagtaaacaagaagaccatcaagaacaaatacccacttcccaacatcaatgagctgttcgaacaactcaagggtgctcaagtattctccaagcttgatctccgtatgggttatcatcagattcgtattcgtgagcaagatattcccaagacggcgttcagaacaagctttggttcatatgaatacaccgtcatgtcttttggcctcgccaacgctcctccgacgttctctcgcatgatgaacttcatcttcaacccctacaccaatgaattcgttctggtctatctcgacgacattctggttttctcgaagaacaagaaagatcatgccaagcacttgcgtttggttcttgacaagctcagggaacatcagttctacgccaagttctccaag

SEQ ID NO: 10702 - DNA, 394 bp, Triticum aestivum
  Clone ID: LIB31-021-Q1-E2-A7
cgggtccacaacaattgttgatgatggcagcacccaggaagaagtgactaagagggttgcacagatcaaaaatctcattgaggcagcagaacaagactacgagaaggaaaaactcaacgagaggattgcaaagctcgccggtggtgttgctgttattcaggtgggagcacaaacagaaactgaacttaaggagaagaagttgagagttgaggatgctctaaacgcaaccaaggctgctgttgaggaaggtattgttgttggtggagggtgcactcttttgaggctggctgctaaggttgatgccatcaaggacaccctcgataacgacgagcagaaggttggagctgagatagtgaggagggcgctgtgctacccactcaagttgatcgccaag

SEQ ID NO: 10703 - DNA, 420 bp, Triticum aestivum
  Clone ID: LIB31-021-Q1-E2-B1
gtccaccgggccggaccaaacacatgcatatgcaaagtcagtgtacacgtactacgcaggaagacattgctttctggatctcctaaatattttgttgcatgcctatgcttacgtacatagttggtcacatgcatgggtttcccggggaacaagaacaaaacataatctactgtaaaatgtttaattttagtcggcagtgccggtgtacgtacgaacgagcagcttgcttgctggtccctccttcccacaccaacgcctgcctgcatgcatgcatgcatgcccggccacccggtttttgtacatactacaccgtggaatgttgctcaaaagattttgatagatcagtgtaggtatatatcaagagagtatataacacaaaactcgtgcctttcatattagaaacagtgtaggtatccccgc

SEQ ID NO: 10704 - DNA, 398 bp, Triticum aestivum
  Clone ID: LIB31-021-Q1-E2-B3
tccacgaagttgtcggaagaggttgagcattggtaggttgacatgattggcatatgtggatgtgctataagatgtgcttgatctcctccgtgcgtcatacacccccagtcgtcagtggtacacgagttgcgataaactggtgacgaaatggatggaaaccactgtgttttcaaaaatcgccatcaattaatggaatcttagcaaccagcaccataagaagtatttgatgattagatgacaatggtgcacactaaggaacccgtccgtgatgaattcatcaattccaaatgtttggaaactaccatgcgttttcgcccagcacacattgactaatctaacacacacaggtcaggtggatcaactgaatgccaagtatcgcacattgttaaaaaataatg

SEQ ID NO: 10705 - DNA, 423 bp, Triticum aestivum
  Clone ID: LIB31-021-Q1-E2-B4
cctgccgtacggcctcgaaaattccaggtcgacacgcatcatcggaaccacatctatcgagagggaacgagtaccggtaacatagaaggaacataatcaatgcaatgaacaagtaccgaacatgtcagcgcaagcgttgctcgagtttgttgcacttgtcgataggatgccggatgtggtcctcacataaggcacagatgacatgatttactaggctcgggagagcatggggcagttctctgttagatccgcatatagggcattcttcgctggcttgattgagtcagacggtgccacccagatttggaaatcgagagttccaaattcttggaagttcttcatctggctggcggtaagaataggtgttggacggcggatagagtgcaaagaaggctacttcctcacccctcgacatgtcccttc

SEQ ID NO: 10706 - DNA, 411 bp, Triticum aestivum
  Clone ID: LIB31-021-Q1-E2-B5
ccgggtccactgcacggatgcaaaggcaatagccgccttcaggcatggtatctaggacaacaccgctttaacatcgtcccccagtatgcatatctgaagctcaagattcctggacctaagggtgtcattatcgttaacggtaacattgagcccttgctccgaactaaggagcacacagcggccctggcagccgaagtccaggccggcaaaggggcacgaaaacccaggaacacatcaaggtgctagacgcacacaaacgagcctgagctacaacaccgcttcaagagccttctcgcgctcaccctaaatagggatacgctccccacaacacggcttctccagccacgaaatacgtacctcgggtacacaatttcgcacttaaaattccatgggcagccgtggggacaaacg

SEQ ID NO: 10707 - DNA, 456 bp, Triticum aestivum
  Clone ID: LIB31-021-Q1-E2-B6
tacggtcctacattcccgggtccaccgacagaaggggcgtacgtgtaatgtgtattgctatgtgtgggatctgactatctagttgtttatccttagtagcctctcttaccgggaaatgtctcctagtgcttccactgagccctggtagcttgctactgctccggaacacttaggctggccggcatgtgtccttcttcgatcctgtgtctgtcccttcgtggaaatgtcacgcgatgaataccggagtcctgttagcctgctacagcccggttcaccggagtccagttagcccagtgctacagcctggattcactcgctgatgaccgacacgttcgatgctgggtcatggatgcctgtccctgtaggttagtgccactttgggtttacaactagccatgtcagcccgggctctttatcatatggatgctagcgacaccatcatatacgtgtgccaaa

SEQ ID NO: 10708 - DNA, 396 bp, Triticum aestivum
  Clone ID: LIB31-021-Q1-E2-B8
ctcgcgggtccacggaagcgtccaaaatgtgtcgtcatgaaagatagaagtacacagcatgatccagcacgtggaccaaagaccattccgcagattcccggtggttcatggctatggccactcgtagacaactgcacatctatacctgacgttcccacgtacgctagtgtgcaaatcatattctctacgttccagatgcaatggtgactgcggggagctggtacacacggcacagcatagcatgatacgggaaaggcctgcacgatctgaacagctaactgctgcctgtatcactagtatacacgctgaccataacctgtgtcgcctgcatccgcatccccaacttcagcatcctctacaggctggacaatggctccttcattgaccacctcccaa

SEQ ID NO: 10709 - DNA, 384 bp, Triticum aestivum
  Clone ID: LIB31-021-Q1-E2-B9
tgagtcgtaggattcttaattctgggcgccgcccattccacgtgacggcctcgcccatgtctgagtttgacaatgcgagtctgatttcatgggcgatgcatctcgcccatgttggccgcttgcttgatcttgtggactctgcactcctggatgttaaccgtgaacaagcgctgctatgcctcactgtcgcactcctgtgtatccataagtctccaatccgtcgcccaacaagccacgaggcacttgaaaagctctctggtgaaggtgaaccaccatatctccctgtacaattctcaacgtcgcctcctggtgggttccccttcagatccctcacgaaatgcctctgagttcactttgttggttatatgccaatggtaatgtccc

SEQ ID NO: 10710 - DNA, 413 bp, Triticum aestivum
  Clone ID: LIB31-021-Q1-E2-C1
ccactgcgaccagatctcagagatgcctgatcttgctttcaccatagcaaacaagactttcaccttgacgccagagcagtacgtagtgaagctggagcaatcaggccagaccatttgcatcagtgggttcatggcgtttaacgtgccgccccctcgcggcccgctctggatacttggagacgtcttcatgggcgcctatcacaccgttttcgacttcggtgagagcaggattgggttcgccaaatccgcgtgatttggtgatcccagtatctccagtgtatcaaggctcaaggccggtattgtacataatccaagcacgtgtaagttgccaggtcaacaagaaatttatcagtagaaaaggaacaaaatgaacttgccatcggcatttcacatttgtatagctatttgctgtg

SEQ ID NO: 10711 - DNA, 422 bp, Triticum aestivum
  Clone ID: LIB31-021-Q1-E2-C10
actcgcacagaaaaaatagccaccatctcatcaaaactttgggacacctttgcctctatcaagtggtcttagttttcaggttgctcggtgagaaattctagttttcctagattagatttattttctcacctattgtccaagaaaaagccacaaaaaaagctagatctattcatcctttgtccaagctagtctgagcctttgcaattttcttttcattgcttgcatagttgaattatcggttgcatcgtcgtgtcgagttgctggtcttagtgtcttgttcgtttagagtttcgagttctgttcacattagtcacgccgccgctgcatcgttatccctttcgctgtccaccacccattcatcaatttccaccacgtgctacccatcattcattgtctaaatgatagttgaggtcgttcacatc

SEQ ID NO: 10712 - DNA, 419 bp, Triticum aestivum
  Clone ID: LIB31-021-Q1-E2-C11
gtcgacacagggggtgagaatgcttatggttcagaagatgatcataagccacttggtatgaatatcaactcagcaaaagtggcttctaataatagcacaaataagaccgttttgttgaagactgcaccacttaagactctgcaacctgatgatgattcagatgatgatcataagccacttgttcagaggttcaacccagcaaaaggggcttccaataatagcacaagtaagcccgttttatttaaggctgcacctaagattgtgcaatctgatgatgattcagaggatgagaaaccacttgccagcaggttacccactaatgctgctccaaaaagtagagctagcacctctgattcagaggatgagaagccactgtctgcccgattttcaagaggtactgcaggtacatctgcgagtat

SEQ ID NO: 10713 - DNA, 354 bp, Triticum aestivum
  Clone ID: LIB31-021-Q1-E2-C2
tccaccatgacgtcttgacatcaaaacatgggggtggcttggaccattgctgactgccttgactgcttagctggtactccatgtacgataaggggtgggaccttaagtagggttaaaatccactacaacaacaacacacatctaagtttctctttctaatctataaggcacaccccgatgtcaccttaagtagtcccaaaaggcatactacacaatcacctcatgatctttatcgttctaatctcaatccacaagtcatcccattgccactatattctccaaaattatactacatatgaatcacataattcattgattccctaaaacaaacacataccgttcaccaaaaatcgg

SEQ ID NO: 10714 - DNA, 417 bp, Triticum aestivum
  Clone ID: LIB31-021-Q1-E2-C3
tccactgtgccgacgcaaaagccttagcagctttcaaacacaatgtccgagacgaatggctcaccagacaccttggccaagaaaagccaagaacaatggccgcattaacaagcctcatgacccgcttttgcgcgggagaggatagctggctggcaagatgcagtaccaatgactcaagtacatccgaagttagggatggaaacaggaaaccgcgacgcagcacggacgaatgtcggaccaagggcagcatcccgaagagcacggcagtcaacgccggatttaaaagctcacagcataatcatagaaaactgccccctaaggataacagggaggagctatctaacttaaacaaaatcttgcacaaggtatgccaaatccacagtacccccgggaagcccgcaaatcatacccacaaag

SEQ ID NO: 10715 - DNA, 423 bp, Triticum aestivum
  Clone ID: LIB31-021-Q1-E2-C5
ctcgcgggtccacgacaatccctagaatgattcatatgatttaggtaggttgccaatagagtttgctgcggtgcgtgattgcaaggaagaggttgaaatgttgtttcctttgactaacccaattccaaatgtccgaaactggagtattgagggagtaatttcttatgcaaaaattcaagataaaaagccgatggagcaaaagcacgttgaaaaaagaaaggctttcttaaagttacaggctaatacggcattcaagcagaaggagtataagttggcatcacagttgtatggtttggcaatagatcatgcagagagtgcagcactgtatgcaaacaggagtgtttgtaaactgctcatgggtgatggtgaaggtgctttgtcggatgctctcaggtgcagaatgctgcgacctgattgggccaa

SEQ ID NO: 10716 - DNA, 390 bp, Triticum aestivum
  Clone ID: LIB31-021-Q1-E2-C9
gtcgacactggtgtcaatagtgtgtcgtcctatggtaatgtaacaccgtctaatttgctgcacgtccatctcccggtcgagggtatgttgcattactcaaataattctcatcatcctgcaagccaccattcttgaggtagatggacagggtcatatgccatcttcaccttgtcacgtaggcatcttcacatgtcaccagtctaccggatataccttccccataatgccagtccacactctctccgttctagttaactaggctattatatgtgttgtgatttaatgagagagctttattcatatatttatcattctcttgtgacaatctacacaaaagactggtcactcacgcgtcgaagtactcctcagcaaacaaaatccttgaatgca

SEQ ID NO: 10717 - DNA, 414 bp, Triticum aestivum
  Clone ID: LIB31-021-Q1-E2-D1
tccacgagtgcgaggcaaccctcaacgagcagatcaatgtggagtacaatgcctcgtacgcgtatcactccctcttcgcctacttcgaccgcgacaacgttgctctcaagggatttgccaagttcttcagggaatcaagcgacgaggagaggggacacgccgagaagttaatggagtaccagaacaaacgtggagggagggtgaggctccagtcaattgtcacacccttaaccgagttcgaccatgctgagaaaggcgatgtcctgtatgcaatggagttggctctagctcttgaaaagctggtgaatgagaaactgcacaacctgcacagtgtagctacaaggtgcaatgatcctcagctgaccgactttgttgagagtgaattccttcaggagcaggttgacgccatcaaga

SEQ ID NO: 10718 - DNA, 354 bp, Triticum aestivum
  Clone ID: LIB31-021-Q1-E2-D10
gtccacacaagtctccaaagttcgtcttcctctacatacagcttcgctgtgaagataccgactgggcctgatatgcccagcgatgtctcagacgacaaacaagctgagcacgctagcatgaacagaggcagtcgagcacatggatcatctttgattcttttcattccacattagatcagggttctggctgaaaatcagttgagacagatcagcgacatctacagatcagatttgccgtcagttgctcaggtcttatcatgccacaattcgtcaagttatcagaactatagttcgacaagatacacacttcacatcagatagactgacttatatgcatagtccaccttttgacaa

SEQ ID NO: 10719 - DNA, 433 bp, Triticum aestivum
  Clone ID: LIB31-021-Q1-E2-D11
gtcgacgccgcttttttattttttttttttttttttttttgcaggatcagtttaacatgataaatccaaattaaactgggggctaatgtcggggatattccccgtagtataacccggcctgaagtatgacttagccggacttggcggctcactagtgacccgccctggcttggccactcactagtgacccggccgagcctagcgactcatgggtgaaccggcaggcgggtcagatgaatgacaaggcccaaggcccagaaggagacttatgagaaggccgactcaaggtacggtatcaagtgggccggcttgagatggaagacataaggaatatttcccttacaagggaacctggactaggattcaacttgtaatagagtagtcctaatcctactaggactagtcatgtgagccaccccttcaacttatctaa

SEQ ID NO: 10720 - DNA, 437 bp, Triticum aestivum
  Clone ID: LIB31-021-Q1-E2-D12
gtcgaccacgacttgacaaaccacacaagactctagtccaggtttatcgcctattcgggttccatctgcaaggagatctgggcggggtgtcgctcacggccccaaacgatgtgtgcagggttcccaagcccacctcaccggatggatctacgcttggtacatcgtgccacttgtgcctgctatgtcccaagcccacctggctgggtgccacttggtagactactagcactacctacaaacactagaaactgaagcttgtgattcctgtagcatgcacgtatggtgaaccgttatgcgatgaagtcggagcatgatttatttattgattgtcttccttatgagtggcggtcggggacgagcgatggtcttttcctaccaatctatccccctaggagcatgcgcgtaatactttgctttgataacttgtagatttttgc

SEQ ID NO: 10721 - DNA, 424 bp, Triticum aestivum
  Clone ID: LIB31-021-Q1-E2-D2
cacaccttctacatgcgtgccaagatcttgggcagcgctggggaccggcaagtcgcgagttcttacctcgaaggcgtcattctggcaaaccaagataaggataacttcctcgtgccttactttcccgagtaagtcctcccctcaaccggcccgtaacatatgaattcttacatttcgatcgtttttcttttaacattccgtgttttctgcactgacacacgttgcacgctcatcctcctaagccccaaatattccatggccacgtatttcgacccggaccgtcagtcgaacgtagactacacaaatgtcaagaaggttcttgatgatgttctccccgggtacgcccaatctggaggcaccttcaccaggcctattcgtaagtatggcaagcacgtgttctcccacaatacgacgttctgctgcg

SEQ ID NO: 10722 - DNA, 456 bp, Triticum aestivum
  unsure at all n locations
  Clone ID: LIB31-021-Q1-E2-D3
ggtacgcctggcggtacggcgtcgagnattccaggtcgacggacacgtccgtaaccggctcagacatgatactcaccttccataatcccgttctgcacatcactgctcttcctgtgggcaccgtcttggtctcatgatatcaagcaagttaagtatgtgtgattcgctattagatatggcatgttcttctgtatatacgcaatcttgacactcacgcattggatgctctgcagtcaacctcatcactggaacctttgagggtgtgtgctagtcttcgttactccctgctctatgcttcatcgcgctcacagaaacactcagacatgtgctgtgtgaagcatgtctctttctgtcctgctatccctgcattttgcgtttgtcaggcaaaggggatgaaatacttggtacagttacttcacatgatcaaatcatttttccacgtctccgagaagtcca

SEQ ID NO: 10723 - DNA, 418 bp, Triticum aestivum
  Clone ID: LIB31-021-Q1-E2-D4
aattacaatcagacccactccaaggtgcatatgcgtagttgacagccagcccacggacgtatcaatcgttatattgctatgccatgccatatttagctgatatttgccggaatcgaagagcctgtggttgaatgattgcgatcatgtcgcatcataaatgtcactcacatacgctaccggattggacacagtcgtcaattactcttaaatgtgcttcttcacaagtaccgatgtgcgtaatatctgttcccaccttgaagtttatgtcaccagtatttattaacgacatggtatcgatgctgctatcgatgagacagctatttgtctttacatgctttcaacactttcaaataattgagtcattacatacctgaacctacttccgaatacatatttgccattgatctgctctgcagcc

SEQ ID NO: 10724 - DNA, 414 bp, Triticum aestivum
  Clone ID: LIB31-021-Q1-E2-D5
gggtccacgagatcataacatgcgccccgcacaagagggatgacatgatgtgagcgctgtctccatgcagcgctctcttaggtatgatggtttgccgagttctggctgggttgctgtggtccacgactgctttaaggtttgattgagcccatttcgattgtcgttgaaccctgacccctaagcgactggaacttgtacctgctagcgttgttctgtatgcagtggcttggttgcctttcggttgattttccacaaagatgatatagtgatgtgtaagtgtaaccttgttttatgtgtatcgtttgcattcagacagacttagtcaagaagatgcatgcaatgctactaattttcaattgtccaaagtgacatgtcggatgctctcaggtgcaaaatgctgcgacctgaatggtc

SEQ ID NO: 10725 - DNA, 309 bp, Triticum aestivum
  Clone ID: LIB31-021-Q1-E2-D6
taacggtcctacattcccgggtccacatccacgtcggaatgctcaaggatgatcgtaccctaaggttagtcctgatgtgcatcccgttgatactgccgcatagattgctcaggtgcatctgtgcgcttgcgcaagtcactgatgtcaagaacacttgactacttcattcacagagtcatctgttacaagagttcgaacgtttctctctgcaggcttccacgacattggcgtgatgtccaacctagctagtattgaaactgcttccagccaattcacattcaatatcatcatccacgtgtttgcccacag

SEQ ID NO: 10726 - DNA, 331 bp, Triticum aestivum
  Clone ID: LIB31-021-Q1-E2-D9
ctcaatggtctcaacggtgtccgccaaggacgccacgaaggaggagtggcactgtaccggtctgatcgtcatccctcgtggagtctatcttggtaaccgtataacactagatcgatgcttgacaatgaccgtattaatccgctaggagtcatcgaccttgtggtcacagcaaccactatgctacaccacatcagagaacacctgctgtacaacttaagcatatgctagacttgctaccccatacatctccaccacactcatatttggatgtggctaatgaaatcctcaataattctgtccatcataggtatagtctccaacatccatcttg

SEQ ID NO: 10727 - DNA, 444 bp, Triticum aestivum
  Clone ID: LIB31-021-Q1-E2-E11
gtccacagtgtaacatgggaccagtttcagcaggcttttcatactgcccatgtttcagcaggagtccaagtccaaagaaaaaaaccatcacgtcgttcagcgtcaagatctcggtcgagatcagtttcttcccattcaaggtcaccgtcaaaggaacgctctccatcaagatcaccagcaaaatcccaatcccctgtcgctgcatctcccgtcgtcaatggtgaagcagcaagccccaagagggacccaagcaagagcccatcacgttcccggtctcctgatgccaaatcagagtaaaactgatgcgaggttaggggcggtgagaggcggagccatgggcttcaaattcttcatattttgtcttcgccgacttctgcatacgctgttatagtactatctgtgttcggttattctaggttccttgatgtttctgtaaaacttgtt

SEQ ID NO: 10728 - DNA, 303 bp, Triticum aestivum
  Clone ID: LIB31-021-Q1-E2-E12
tgttccttggagatgtgtttgtttcaccggttgataatacctcttgttatctgctgcaaaaaaaaaaaaaaaaaaaaaaaaaaaaaaaaaaaaaaaaaaaaaaaaaaaaaaaaaaaaagaacaaaaaaatccaaacttaaaatatgaatcaacacaaaatcatacctcttctataatatcaccaaaattcaaatcaatggacgtcattttacaacttcgttatcagaaaaacccttcagttaaacaacttaatcaccttacagaacatcactatttcaacatctggcataataaccaagaggc

SEQ ID NO: 10729 - DNA, 408 bp, Triticum aestivum
  Clone ID: LIB31-021-Q1-E2-E2
tttgacagcaaatggcggtagtgtgaccatccattaccccatgcttgcaggcgacaattatggggtggaagatgatggcgcggtcgaataaataaaggaccaagaggctttcgcctccctagcccaaggtgtgcctgatgagcatgaaagaatcatatgggataggaaaatttgtgttgcagctaaccttcatggttaatgagatgcgagatattggataaaagatgcaggtaaacatagttgtggaaaagttactatgggttgttcctgacaaatgtctaccaatctttggcaccatagagtagtggagcgatgtgaggaagatgtcgacgatggaggtgattgggtggctgatgacctatgagctggcgttgaagggacgtgaacgcggctaaaaacaagagcaga

SEQ ID NO: 10730 - DNA, 306 bp, Triticum aestivum
  Clone ID: LIB31-021-Q1-E2-E3
cagcgtcaagttggcgatgacaaacgctggcacacagtctgaatagaaggctctgtgcagtcacaaaaccttgcacaagctagcatgtgcaatgcttaacacagaactgcagtcacaatgttatgtcaccgcaccatgtgtgggctatgtctgcccaatgtgttgtgccacaactgttttacaactgcgtggttgcgctatgctgcctggacaattgcttgcatacaccgacaagttgcaacagaataccctactctaatctctaatcaaaagatcatctgtttacttcccaaacaatctgccgct

SEQ ID NO: 10731 - DNA, 418 bp, Triticum aestivum
  Clone ID: LIB31-021-Q1-E2-E4
ttcaagtattcactgcaagattagcatgacgaatatatttcatccaacagagtcacctctcatagcaccttaccatgccataccagacataaccgtcttgactgagaccggcgacaaactcatgcctacccaaggcagaggttttcccgggttcctgccggtatgcatgcaaggcatatgagggtgattatcatcacaagtgtgtccattaccaacagcatggaatcaacaacatgcacccatgcatatgatcatatcacatgaaataacaagtccttcgaaatgcggtggtgttataaatgtatcaacgatcacaccataaatattatgccggggttcagaatgcttgccttcaatgtgtggaaaggcacggtgcactccaaaacttttgaaagtttcctccctctctccaaaataa

SEQ ID NO: 10732 - DNA, 442 bp, Triticum aestivum
  Clone ID: LIB31-021-Q1-E2-E6
gcgggtcgacgagaatcaatgctctgatgaagactccatgatatctgctccagcttcatcaacatagtcatcatcgctatcctctgggtctgagtcggtgtcgtcgatgatgatgtagttctctagacaggtgcaatcttcgtcttctcctccagttgcgggaaatcccatgaatacttttagcttcttcttcagaccatcgtccttctccactagtgtagctatttcctcctcatatccatcgcgtgtagacttgagttcttcctccagctccatgatcttggtcatggctttctttagatctatcatgcctgcacacatctggttctcctggcgtcgaatgtgctggtttaactcctggatgaaagctgcaattgatctatccttcctggtgttgatcatctcccattgctcatctcggctcccacaaatctggtagata

SEQ ID NO: 10733 - DNA, 421 bp, Triticum aestivum
  Clone ID: LIB31-021-Q1-E2-E8
cccaagcgtccgatccattacccagttaagaaggcccagtcaactcctttatccactggaaaacaagaagacaaatgcccagtatctgtttgctgatcggagctgtcagttcttggtagacttactttctgccctcggattcagaagagtactgtgtgttggaacaccaaggttgcatgagctgatcaagttgacagcatcaggtgacaagaagtctaacattaaaagccttttattggatattgattttcggtattcacagttttatatggaagatagcttttgccattataatatgtttaaccatcatttctttgatggaaagactgcccttgaagtatgcagagcatttttacaggaagataaaggcgaaggaatcattatggtgacggatcctccgtttggtggcttggttgaacct

SEQ ID NO: 10734 - DNA, 437 bp, Triticum aestivum
  Clone ID: LIB31-021-Q1-E2-E9
ttcccagagtcgacttacacgtccgcgatctcgatcagcacaactggatacatgacacctttgactcaaccatatggtatcagaattccaaattgcgcggtgagaattcacactacatcaacgactttatcaaatctgctctacgagacaactgtccaataacacgtgaccaaattattagaggaagagcaccaccttagtacaatatcggatacattacacaatcttaatatggcttcagcttagacaagttaggtcactaaagctgttttcaagtatctggtctggcatgtgaatcacatacagtaattcattctggtgacaaaattaccctgctcaaccgaattacccacaccacattgcaaactcaccacaatgcgtacactttaacgctaagcaactatatctacaaaacaagagtcgtcagtagccactga

SEQ ID NO: 10735 - DNA, 430 bp, Triticum aestivum
  Clone ID: LIB31-021-Q1-E2-F1
ccaccaggctgagaaaatgggacatgactacatggatgttgaaagtctcaagaagatgaacaagaacaagaagcttgttaagaagctagccaagaagtaccatgctttcttggcatcagaggccataatcaagcagatccctcgtctccttggccctggtcttaacaaggcaggcaagtttcccactctggttagtcaccaggaatctcttgaagccaaggtcaacgagacaaaagctacagtcaagttccagctaaagaaggttctttgcatgggtgttgctgtaggcaacttgtcgatggacgagaagcagatccaacaaaacatccaaatgagcgtcaacttccttgtgtccctcctgaagaagaattggcagaatgtgaggtgcctgtacgtgaagagcaccatggggaagcctgtacgtgtgttc

SEQ ID NO: 10736 - DNA, 425 bp, Triticum aestivum
  Clone ID: LIB31-021-Q1-E2-F11
cgacgacgaggaagcgggataggcatcgccgacgtcgatgcgggaacaacttctatatagagttaaataaagtagttttattaattaaatcaactagctagttcaactactaaacacttactataaataaataaagtagtacttactaaaaacaaactactatatatagtaaaataaagtagtttattaaatcaactagctagttcaactatatatgaagcacttactataaataaaataaagtagaattactagaaataaactagtatttttctaactaattagattaaacactttctcttcttatttttttcatttttctaaatacgtactatgaacaaaagaaacattaaaaatccataaacaaaattacaacagaaaaaaatcataaagattctatgaacaggaaatctatgaaatacaca

SEQ ID NO: 10737 - DNA, 436 bp, Triticum aestivum
  Clone ID: LIB31-021-Q1-E2-F12
ttccagggtccacacaatggctttaaatctgatgctcatcgtgatgaaatcggtaagattgcaacttataggataaggacacttctgaggatgaatgcagggtcaactgtatcagagttcgatttgactggtgatctttttaacactcttgaacatcacagggatctcatcagggatcttaacacgtcatccaacttaactccgagcagatgccaaacctttaaggacgccacgaaataaggagttatgattccaagtgatattgatgttacatttgagaattttccctaccagcttagcgagaatacgaagaatgtgctcttatcatgtgcaatcttacatttgcacaagaaagaattcattatgcagttctccgaaatttcatcactaaatcagcgaattttattagccggtccatcaggttcagagatttatc

SEQ ID NO: 10738 - DNA, 418 bp, Triticum aestivum
  Clone ID: LIB31-021-Q1-E2-F4
tccttgggactcagtagttcgaacaacagtgacgatcatcggttggctattctaccttgatcgcctagacacaaggaagaatcggcataagaggaagattctcgactcttcagcgtgtcctacatgtacccactcggttgaggatcgacaacacctttttttacttgtccagcagctcgcatgatctggagagcaaccggcatctgccctctttacactcctatcacaagtctcttcagcacgaagcttccggatccgctgcctatcacagtccgccccttcatgctccttttgattctttggaaaatctgggacgcacgcaacacgaaagttttccaaggactagatgttgtggcctcaaactccttgagagctatcctggatgatttgagtgtttggtctcatacactagaatctg

SEQ ID NO: 10739 - DNA, 381 bp, Triticum aestivum
  Clone ID: LIB31-021-Q1-E2-F5
ctcgcgggtccacactcaccactacactcagtcggcctatggtcgccatcgctcccgcacctgcctcataactcggtagctggacctgcctacttcaccacgccaccagataggtcgcatcctcatcccaaatcactttgtttacgcgtccgttgtctgcatttttattctggggcaatcgattcccactgggaaccagcaccccttgaggcaccggagctcctatgctgccggttggctggtgtctaacgtacgggggatgggccgcaacttcgtcgcggaatcagcacttatatggctatattacagttgcgtaggttggaggtactgccgccgccggatctagataacgacgagtccttgtgaattggcccgggggcg

SEQ ID NO: 10740 - DNA, 445 bp, Triticum aestivum
  Clone ID: LIB31-021-Q1-E2-F6
attcgcgggtccaccgcaagctgcaacgagatccatcgaatctcttcttctttggcggtctgcaccttccgtgcgggctgtggaggacggatgacgcggtgctgttagggcgctgacaggcaacggttctacgtcccctctccgatcagctctttcatgggacaggcaattgaaggtatggactacaacagtacagactgttatatatctggaaggcgaaattttggggcggtacctgcttattgaatgacagacagttatataagagagaatattcctaggtttgccatgacatacaagatggtggcaaggccttgctcgttttagaggacatgggatacatacaggaagcagctgaaattgatgttggcaagtctggtatttacaataaatctcatgaagtcattcaacatacgtgtgcgaacaaacaatttgtcttcctgga

SEQ ID NO: 10741 - DNA, 397 bp, Triticum aestivum
  Clone ID: LIB31-021-Q1-E2-F7
ttcgcgggtccacacaagagtctgagacgatgaggacgccatcttgtctgccgtatccggtacagccgggtcgagaccggaagatgacgtgcatgtagtagtgtaagcaagcctcgactgcccgtactgcagacgcaagtgcgtcacatgtgggatctatatgtgccaataagacgtcaggctggtcgtacgatagtgacagacacaactcaaccatccgtgtcgctcacgattcgtcatgttgatgggaaacgttgatacaaagcgtgcttcacgagctttgcactagctcggccactccttccgcacggtcactctgaaggcacagtgcagacgcagtcgcagcagtggttggctgatatctcaccactccctgtgatggaagtagtcgtacctg

SEQ ID NO: 10742 - DNA, 451 bp, Triticum aestivum
  unsure at all n locations
  Clone ID: LIB31-021-Q1-E2-F8
gggtcgacacaagacacaaaggactcatcagaatagagctatgcaccccaccaacggcgccagaaaatagtcttgataacccacaagtataggggatcgcaacagttttcgagggtagagtattcaacccaaatttattgattcgacacaaggggagccaaagaatattctcaagtattagcagctgagttttcaattcaaccacacctgaaagacttaatatctgaagaaaagtacttagtagcaaagtagtatggaagtaacggtaacggtggcaaaagtaacagtagcatttttgtagcaatcgtaacagtggcaacggaaaggtaactaagaaaagatcaatatgtgaaaagctcataggcaatggatcaatgatggataataatgtcagatgtgattcctcatgaaacagttataacatanggtgacacagaattagctccaattc

SEQ ID NO: 10743 - DNA, 402 bp, Triticum aestivum
  Clone ID: LIB31-021-Q1-E2-G1
cggtgaccacaagatcatgtacgcgctcacctccatcaagggtgtgggccgccgcttctccaacatcgtctgcaagaaggccgacatcgacatgaacaagagggccggagagctttccgcggaggagatggaccgcctgatggcggtggtgcacaacccgcgccagttcaaggtgccggactggttcctcaacagaaagaaggactacaaggacgggaggttctcccaggtcgtgtccaacgccgtggacatgaagctcagggatgaccttgagaggctcaagaagatcaggaaccatcgtggtctgcgtcactactggggtgtgcgtgtccgcggtcagcacaccaagactaccggcaggagaggaaagactgttggtgtctccaagaagcgataagctgc

SEQ ID NO: 10744 - DNA, 441 bp, Triticum aestivum
  Clone ID: LIB31-021-Q1-E2-G11
gtacccgtcgtaaattccgggtcgacaagagaaattcagcaatgcatgtgacgatgagctagtgttagtatgtgagattcactaaatcgcatacaaagtaatgttttgagtgccggatggattggtcaccataccgacttactcatactattcgctttgctatatgggatggaaaatctgagtgacttacctatattacagagacaatgatcaagtccttgttcagaccgtagaatggtaccataacatttcccttgtacactgcagctgttgccaactcgtaggacatactgtgaggttcactgcacacccattttcctgcatgagacaccatagcttgttgactaccatgagatatctatacttgtttagtattgcgagcagaatcatcagttcagaacatacagtctcgggataaccgtaccattatgagaagacatg

SEQ ID NO: 10745 - DNA, 437 bp, Triticum aestivum
  Clone ID: LIB31-021-Q1-E2-G12
cagctagaagtgatcaagatgtgatcctgaaactgcttacgcacaatcataacaccaagaccgtgttcacttcccgaactctgctgaaaagagaccatcacggctacacacgcggttgatgcgttttatttcagtcaagtgtcaagttctctacaatcggatattaacgaattcccatctgccacataaccgcgggcacggctctcgaaagtttaaaccctacaggggtgtcccaacttagcacatcataagctctcacggtcaacgaaggatacttcttctcccaggaagacccgatcagtctcggaatcccggtttacaagacattttgacaatggtaaaacaagaccagcaaagatgcccgatgtgccgacaaatcccgacaggagctggacatatctcgttctcaaggcacaccggatgaacactatgttcaa

SEQ ID NO: 10746 - DNA, 420 bp, Triticum aestivum
  Clone ID: LIB31-021-Q1-E2-G2
gcgtctgctaatgctggtaggctgatgctctgctcccgcacgtccatctgcgtgctgctgttgttccgctgccctttgctgctctactcagctgatgcgttctgctagcctacttgctagttgatgcgttcctgctagcctatttgttagctgccgctgctgatcttttagtcattgcattagtctggcatgtgctttttctatatttttcgctgcgtccaccaaattcgttgatattttgtgttttctcatgtcatgtgagtccaccatacctatgtctgtcagcctttttctggtcattgtcctctctataggatttctgtggcctctctttgcattgttgatctaagcccattcccttgccgccgagcttctttcgccgttggttttcatgggccatgattctttaggcaatgcttt

SEQ ID NO: 10747 - DNA, 444 bp, Triticum aestivum
  Clone ID: LIB31-021-Q1-E2-G3
ctccgacagaaaacgatatctatctcaccgaaacattgggacaccttcgcctctatcaagtggtatcagatttccaggttgctcggtgagatttttacagtttttcgtagtttagatcgagtctgttcttcatacctacaatccacaaaaaagccaaaaaaattagggttagttcatcatatctgaaccaatctgagcctttgcatagtctttttagagttttgctttgttgaatttgcggttgcatcgtcgtgtcgagttgctggtcttagcgtctagtcccttagagtttcgagttctgttcacaggttgtcacgccgccgccacaccatcgtcatcatcattgccttatactaccaccccaccatatacatcgccgctgccatatacaaccaccaatccgagtccacatataacatcgccatatacaaccaccaatccgag

SEQ ID NO: 10748 - DNA, 395 bp, Triticum aestivum
  Clone ID: LIB31-021-Q1-E2-G4
gtcggagactgacaccgcatctacactaagcatccatcccttccccaagtggacgtgatccaccgggatgttagagatgtggccacagtcgttttgtgcgagagagtgtgaagagagcaaccccagcaagcaaccgtgtaggatggcccgtcctgactatgtatatagtggagcggtttccttttctctccatatgaacctatcatattgcgtacgtgccactgaagaaaaataataatttataaatgacgcgacacctactactcgttctcctataaccttgcgcttggcatctccaaaatattaaccttgtgattggctcttcgcctcttcgggaagtcgagcaataatggtagtgcagtatatatcgttctggctatatgagaccgaatgaa

SEQ ID NO: 10749 - DNA, 362 bp, Triticum aestivum
  Clone ID: LIB31-021-Q1-E2-G7
gggtccacggacacatattagagtggttcgaatcaccatctgttgcagtcagtcaagcaacgggcagtgaccagtagcataaaacaatttacatcttaggtttcacctgacatcgcattgaacacctacaattctgcagataaatatgacataccggcgtcggcagtggttcatgaagaatctaacgtatgtatcacacacttaattgacaacataacacttgatttgacatcagttcacgccattgaggatgatgtgggcccacctaagtaacgatatggcctgacgaactcgattacaagttcggattgacgatgacagtgctcctaggtccgtatctatagaacataccagattgtgga

SEQ ID NO: 10750 - DNA, 212 bp, Triticum aestivum
  Clone ID: LIB31-021-Q1-E2-G9
cacacgtcctagactcgcaggtcgacccaacaccccaaaatgattcaatggagtctgcaatgaaggcaagtttcggtaatacataagcccttactagttaagtataattaccacaggtcgaatcttgtataggcacacaatcatcaaacggtggtatctgagcatgagtgaaaacagaaaaggacaacattgacgcttaattctgcatgatc

SEQ ID NO: 10751 - DNA, 409 bp, Triticum aestivum
  Clone ID: LIB31-021-Q1-E2-H1
caaagttggtcgtaatatgccctgaaggcattaataaagttgttattgatatttccttatatcatgataaatgtttattatttactctagaattgtattaaacggaaacttattccatgtgtgaggacatacacatacacagtgtcacttgtatgcctctacctgactagctcgttgatcaccgatggttaagtttacgatccatggatatagagtttccatttgaacaacagggtcatatcattatagaatgatgttattgacttgaaccaaccgtaagcttatcactatgattgtttaatttactgctattgctttctccataacatatacatgttcgtatgactatgagattatgctcctcctgaatattggaggaacacatagtgtgctatcaaacgtcagaacg

SEQ ID NO: 10752 - DNA, 263 bp, Triticum aestivum
  Clone ID: LIB31-021-Q1-E2-H10
gactcgattcagggcacaggatgggatggtcaagtggagtttgcattgctagcaagctgcattcgggactacgaggggaatgatatcttcactgtgctcaagattcccatggatgtctcccactgtcgcgcgttgttgcatcctccatcgtggatattcatcgaacgacgtgttcaattgggtcgtcatggcatctaacagatattgagagctctatgggctaagccacatcgtttacatgctgatgtattgcgtgtcggtgt

SEQ ID NO: 10753 - DNA, 215 bp, Triticum aestivum
  Clone ID: LIB31-021-Q1-E2-H12
tggtaagattctgatgcagctctcttacttgataagatgatgataagaacattcatcatcttccttgcagatatctcttgcatctttaatatcatacatatcagcattaccatacattcagtgagtccagtcatgaactcaatcattcaacgtgtcgttctctcggtcggtagcatcctatttaggcgcatgcttttcgacacgctaacatacaa

SEQ ID NO: 10754 - DNA, 371 bp, Triticum aestivum
  Clone ID: LIB31-021-Q1-E2-H2
ggtggataagccaacatcagacacaccagcggagtaccttgctctgaaaccacatgaacgtgcattatatcgactatacggggggtgaatacgcgatttttatgaattcgtcactgaggaatttgccagtgaggaacttccttagcgaacaactacttgtaacagaataagtacgtatacgtaagcatatcacagtacagacatagtcatcatgatgaattggacacaagcatagcgtacacaaagcgtaatcatacgataacacacgatgaagacaaacatactgacgaaattgaactaacgaaattgagaaagtcatcagtcagagtcgtcaaacatagatatgaacaatcagtcaacacagttatgag

SEQ ID NO: 10755 - DNA, 413 bp, Triticum aestivum
  Clone ID: LIB31-021-Q1-E2-H3
atcgacaaggaaaggagggtgcccgaggccacaaaggagttggactcccttgcggacgtcgccggtatgctcatcgacgactactacaacaacatgaggaagaagatcaccaacgattaacacaagcactggaccaccctgcctctgaccatgaggcacatcgagtacgcggcaaaggacgcctacgcagcgtacgagatgtggagccgcatcaccctcacccaggacgggcttcgccgtgcaaagctggagaaggaggagccccaagaagcgcgccaggagtagccaaggagactctaattggtgaagaagcagacggtgccggccaagagccaacattgctcgcgtcattttagatttatcatcaaatttgtttttttgtttgcttatgtaacgttagtttgcctgtgatc

SEQ ID NO: 10756 - DNA, 388 bp, Triticum aestivum
  unsure at all n locations
  Clone ID: LIB31-021-Q1-E2-H4
tatcatctgtctgtggattagtagccgtatttagcggtactctatatgccatgactaaaggtgccatcaaccagttaaccaagaacctagcatgtgaatgggcaaaagatggcataagaacaaactctgttgctccatggtacataacgacttcgcttacagaaggacttttggctaacaaggaatttgaggcctccgttgtgagtcgaactccactggggcgtgtcggagaaccaggagaggtatcatcgctggttgcttttctttgcatgcctggttccacttacataacaggccagacgatctcagtggatggaggtatgagtgtcaatgggttctatccagcttgaagactanncaaggaagaggcatatttcgctttgttgcc

SEQ ID NO: 10757 - DNA, 353 bp, Triticum aestivum
  Clone ID: LIB31-021-Q1-E2-H5
gggtcgacgtaaacgtccaaatgagatatgcccatcgcgtgggctggcagacacgatgccagctgtcacttgtgtactcgttgacagtgtaatatcaattaaagcaggtgacctgggctagggtcatgtgctcagcggtcagatagacccagtgcatgtgttgagtgcagatcggatggaggtcaagaatgtgtcacattgccacacaatgtttctgacgtctcgtgaattccacaatgcgatgaatgaacgtgagctgtcttcactgacagctgtgctcaagtgcgtcaaggagcaaatcctggctgagcaatatctggtggacccacatcagtaaatgctgattcagctgg

SEQ ID NO: 10758 - DNA, 398 bp, Triticum aestivum
  Clone ID: LIB31-021-Q1-E2-H6
aactccgtaatgttcgtcagcggacttttggttctactattaaccaaactcggtggggacagtcatcctcagcttgggcagagccttgggcagcttggactgcgtcactcgtgggtgcttgggagctttttctgtcagggctggttatgaggtccgataggcgcttcgacttaagctctgcatggaatagtcgtcttacgaccttctcgcagtgggtcatctgttagcttgggtcgccgttccgttcacggagatctgtcttcttcctcatctgctgcacaggtttcatcttccacatccacctctcatttctggtcagttccgtactcttccctcacgtcaccacgttagcctccactcgcatcacgattatcaggctgctcatgttctccatcccc

SEQ ID NO: 10759 - DNA, 407 bp, Triticum aestivum
  Clone ID: LIB31-021-Q1-E2-H8
gaattcatctcaattctaggtggggtgtaagtttgaggtcatgcattgcataacaatgtgcaacgtaggcctcgtaattccaggggatcgtcactcttcacaggttcctaaacatggattccaatttcgtccgaggtaaatgcatgcacatcattggtacaggatcgacataatacatttcatctagcgtatgacgtctgtgttggcctagctgactaactgtatctggcctgtaacatagcgttcacaaattgatgagcagcgtactgctttatgactcacattgacgtctataggattgataacatgtatcctacagcattattaccagtcattcagcagtaaggtcaaggtgattgcttgttcattcctatgcatttatctatcactctctcagcaagcttgtc

SEQ ID NO: 10760 - DNA, 141 bp, Triticum aestivum
  Clone ID: LIB31-021-Q1-E2-H9
cgcagtgttccgagaagatcctcagacggcctggctgctgtgatgatccggcgagtggtccgtaaaggcagctcacacacattaggcgtcgctctagctcattggctcgctctcggctcatggcggtcttgtgcctcactg

SEQ ID NO: 10761 - DNA, 121 bp, Triticum aestivum
  Clone ID: LIB31-022-Q1-E1-A3
tccttcaccaatcaatgatcacattaattgcagcctaaccgcatggctatctcccgggcagctccagcccctgctgcgaaggacctgacatcaagtcatgagtcatttggttgtcaatttg

SEQ ID NO: 10762 - DNA, 424 bp, Triticum aestivum
  Clone ID: LIB31-022-Q1-E1-A4
gggtcgaccacagctgggaactcgatttcagtcagatccatggcgctcttgggttgcgagggctctttagtgaaatggtcttcctgaactgtcgccgtgtgaatatgctccaagaacacattgctgggaatggcttctctcttggaacctatctttgccaattcatcggctgcttgatttttcagttgggggacgtggtggagttctaacccctcgaactttttctcaagctttctcaccgcgttgcagtaaccagtcatggctgtacttctgacgtctcactcctttatcacttgattaactaccaaatctgagtcgccatagaccatgaggcgacgaacgccgagtgagatggccatgcgcaacctatacagaagtgcttcagagtgaatctggaagacatatctgagcttgtctcctcggt

SEQ ID NO: 10763 - DNA, 421 bp, Triticum aestivum
  Clone ID: LIB31-022-Q1-E1-A5
ctcccgggctgaaaacttcatcaagatacactgctttgtctatgtcaacagttcgttttctccaagcccagaacaagcctggaaaattgaactgtataataattttgcaatagacgggaagcttgtggtaaactatgctttatcggcagcgtggggttaaaagattggatttgctggaagaagcgaatggatggaaaacgccgtttgaaatttgaccggtttacgtgtatagctggggttgtaattggtcagtcaaagaggcactagctctcacatatgttgatgatgaaagtaaaggttcttgcgaaactgccttttctggcattgaactgtccaagtgttctctctctctacagtatgtttagtggttcttgattcatgtcgtgtgtgtgattgggcctagagaaacggatggattttt

SEQ ID NO: 10764 - DNA, 344 bp, Triticum aestivum
  Clone ID: LIB31-022-Q1-E1-A7
ctcgcgggccgaccatcctcactatgccgcttcatgataagcagacgatactgctctcgtggctcgggagcttcctcaaggttgggaacacctgcccaaactggaaaaaggccttgaagtgttgtggaagaagacctttgtgcggccttacgtcgaacagcacgggaaccggtcgcagtcgtgtcggagttgagatctccggtggcttgcgcagggaagctatcgcgcgccgtttcgtaagtagaacatctctgaaaaagggtttagtcgtataagttgatttgtgtgaggcttgagaatatgtttgtgcgctgtgctttgtggtgcttcttcgggtcttcgcc

SEQ ID NO: 10765 - DNA, 425 bp, Triticum aestivum
  Clone ID: LIB31-022-Q1-E1-A9
ctcgcgggccaacaccttccacaagcatgcaacgatctagggcagcgctagggaccggcaagtcgcgagttcttacctcgaaggcatcattctggcaaaccaagataaggataacttcctcgtgccttactttcccgagtaagtcctcccctcaaccggcccgtaacatatgaattcttagatttcgatcgttgttcttttaacattccgtgttttctgcagtgacacacattgcacgctcatcctcctaagccccaaatattccatggccacgtatttcgacccggaccgtcagtcgaacgtagactacacaaatgtcaagaaggttcttgatgatgttctccccggctacgccaaatctggaggcaccttcaccaggcctattcgtaagtacggcaagcacatgttctcccacaatacgacgt

SEQ ID NO: 10766 - DNA, 445 bp, Triticum aestivum
  Clone ID: LIB31-022-Q1-E1-B1
actcgcggatcgacttccatcacaacgatattcatcatcacatcgaaagacgggacacctttgcctctatcaagtggtatcagatttccaggttgctcggtgagattttacagtttttcgtagtttagatcgagtctgttcttcatacctacagtccacgaaaaagccacaaaaaaaaattagggttagttcatcatatccgaaccaatctgagcctttgcataatctttttagggtttttgctttgttgaatttgcggttgcatcgtcgtgtcaagttgctggtcttagagtctagtcttttagagtttcgagttctggtcataagttgtcacgccgctgccgcaccatcatcatcgccttgccatctaccaccattgcttatccgccaccgctttgaacccgtatccatataccaccaccgctgccatatactaccgccatat

SEQ ID NO: 10767 - DNA, 425 bp, Triticum aestivum
  Clone ID: LIB31-022-Q1-E1-B3
gacatgcgactccacacgatgaccatgtatggatgttggttccatggggtcttcttggtcttcggcgttttccaaagtatcattgtctcctgtgccggtattgctgtcctttccgcgacgcgatttatagcggcgccgattacatctaagccttggtggtatcccaagagggttggccccctccgggacaatcttaatcatctacgtcgcaatccttaagtgtgtccaccatctataaaacgcatgatgaagttgccgtccaacgtccggtaaatggtgggttttgggcctgctcttctctggcatcgtcgtccataccatcgatgtcttcagaggcgtagtgaaacatgtcagttagatcctcgacagtgggtatgaagttggggcgggttggaagtaaaattccctattttcaacccctaatc

SEQ ID NO: 10768 - DNA, 221 bp, Triticum aestivum
  Clone ID: LIB31-022-Q1-E1-B7
ggcaccatagtcagtcgtatcaccgacgatgaagagtaactaaggtaatacgtagatgtagtacgtaggatttcttttgcatgctttgcatgaatctagcagataaaatatgagagaggcgaatgcaaagtgactaatttaagaaatgcctagtcaatgcacacatccacggacgtttgaggggatttgccaagtccgaaggtagatgactgtttttttat

SEQ ID NO: 10769 - DNA, 410 bp, Triticum aestivum
  Clone ID: LIB31-022-Q1-E1-B9
ctcgcgggtcgacattagacccaacattgagtcgctctagcagcctcggtctagttgtttatgggtagtgcgagccctacagatgatactacagacttgttatgatgctgttttggtcctgagctccggctccgtttggtcaatggaatttgttcaatgagccctgtggatggggcacgtcgccaagttcgcttatagacgatgaatgtccggtgtaaagtgtatatgattgggccgttattggtggattaccaatacgatggtttcattttttttatgtcgttgcaggattcaatgaatccatttttgtccgtacgaattgttgaacatcgttcatgcatgtcactgtatggtttgacataggctggtgaactaaactttgcctgcatctgaacatcacgtacatcgac

SEQ ID NO: 10770 - DNA, 359 bp, Triticum aestivum
  Clone ID: LIB31-022-Q1-E1-C3
cctggtggagcgcgacctcatcttgaaccagatgcacaggctgacggcgaccatcgcccctatgcccacggcgacaccaacgctgacgaccagcccgagcacagaagccacgccgacgccgagcccgactacacccacgccgaccccgaccagtctcacggcagaggagcttgccgtttgatgtgttccatgtctatgattccttcctttttgatcgctgaacttttgggtgtgtttgattgccgaactatggcatgatgatcgctgacttgtggcatgatgatcgccgaacttttggccttttttggcagcaggaaagacaagtttgaatttttgggcgtctgggggcgaaatctggg

SEQ ID NO: 10771 - DNA, 316 bp, Triticum aestivum
  Clone ID: LIB31-022-Q1-E1-C4
gggacgacagtgtaccccaaattgcctcgtatgaactgatggccaagggtgtagctttcgatctgctccacatggccaagcaaattggcccgcagtgcgaagccgccgaatacgaagatctgtccagggaggaaagcctcgccctggaccgcatcgctagcgatgatcgaaggagacatcaagccttatgatgacgacacagaggaactctcaatgaaagcaccaatgtcggtgtcgaaaccggcggatctcgggtagggggtcccgaactgtgcgtctaaagcggatggtaacaggaggcaaaggagaccatgtt

SEQ ID NO: 10772 - DNA, 394 bp, Triticum aestivum
  Clone ID: LIB31-022-Q1-E1-C7
gaggggagagagagagcacacatggaacccaccagtaagtgaaggcgaatagtactaaacataatattacatgttatccattaattaggctgtggtaatataaaaacattatgtgaacaaagggggtacaacaaacattgctattctacgtatgttgcctattgacgtgcggcttgaaggcccggtcgcatgttcgatcctcgtcctttattttttaatttgtatatgggtccaaatttgtttcatgacatgtgggcccctcggtgtgtagtttgtagcactttaatttgtgggtcgaaatttgtttcattccaagtggactatcggtgtgtagttttgtagcttatttataataattaaagagaacaacatagttttttcaataataccatgg

SEQ ID NO: 10773 - DNA, 421 bp, Triticum aestivum
  Clone ID: LIB31-022-Q1-E1-D10
gggccgacctgcaacgccatacgtgaacgcagaagcgcgacaaggcacgaaggcgtactgcagcgctcgtcacgtgcgggagcacagttggacattggagtccgtcgcaaggatgtgagggcgtggagcagggtcagtcgtgtgcggcagcgaccgattatctatttttccctcggtcgatcataggcattcaatctggcgctcgtgacttctaaacacagcagaagtctaaatcagatcgaaacattatcatggaagaaattacaaagctgtcctcgagccaaatctaacccgaataatatcaatcgttggatgaacttaatactacccattacatccggtagtatgatgtaccgtaaaatatctcgacatgacatagtttgttttgtggttgcttaccacatacatcatgtgaaactct

SEQ ID NO: 10774 - DNA, 412 bp, Triticum aestivum
  Clone ID: LIB31-022-Q1-E1-D11
ctcgcgggccgacgctgctcacaaacgtgagtcgggcgaatggtaaacgttgtgtgaaaaatttgaagcatggggtgttctttgagtgcttttgttatgagtggcggtcggggacgagcgatggtcttttcctaccaatctatccctctaggggcatgcatagtagtacttttcttcgagggctaataaacttttgcaataagtatatgagttctttatgactaatgtgagtccatggatcatacgcactctcacctttccgcaatttgctagcctctacggtaccgtgcattgccctttctcacctcgagagttggtgcaaacttcgtcggtgcatccaaaccccgtgatacgatacgctctatcacacacaggcctccttatatcttcctcaaaacagccaccataccta

SEQ ID NO: 10775 - DNA, 426 bp, Triticum aestivum
  Clone ID: LIB31-022-Q1-E1-D12
ctcgcgggtcgacatggctctcaatactgagtcttactatataagtttgccatttggctcccggagtttgaattaccatggcggatggcaagtcacagaatgcaacgttatgcatacgagcataattttcagatatacaagaatgtgaggctcctgtatcgaaaagaacagatgccgggtgtcaattaacaagaagcgtaccgagaacgacgttgggatcatcttgagcttcttcggcagagatacagttgacatggccacgtgaagcggtgaccggtttagcgtggaacacttttcctgtcggcttgccacggacaacagctttagcagattgattggggttggtctgggggcactcactcatatagtgaccagattcgccacactttaaagaggtcatggaactggtacatggaggagcattat

SEQ ID NO: 10776 - DNA, 448 bp, Triticum aestivum
  Clone ID: LIB31-022-Q1-E1-D3
actcgtggatcgacagtactcattatagtaagtcgaatgaaagaacttctactagtaaaaaagtgatttctgttgaagaaattaatactttgagtgataaagtagatgcgcttatgaaaatggttgctagtaaaagtgctcatattgattgtaattttgtgccattctctactttgattgagcaaaataatgatctcgtagatgtgaattttgtctctcaaaacaatttcaatagtaatgcttatagaggtaattttaatcctaggccatttcctagaaattcctctaatatttatggaaattgctaaggtaattattacaataataataggatgcactctaatcttgaaagtaatgttaaaggatttattaatacccaaaaggttttcaatactatggtagaggaaaaattgagtaaacttgatggtatgcctaggagcatggatag

SEQ ID NO: 10777 - DNA, 325 bp, Triticum aestivum
  Clone ID: LIB31-022-Q1-E1-D4
acaccaggccctagactgagtcttagcacttgctgtgcggtgcgccacgcctctcgctctacggtgctccaccgctctcgtcgttccgtgaaccgcaaccaatcgacgttgacgcgcctagcttgccttgcggcgctccatcgatcatgttgtgcggcgagttgcagcctctcagcgctgacatgcccatcttgatccacagtgctgaaacgcaattgcaccaaaggtttgctcaagcctggcgatgacgcacatcacgggatcgtctaactcattgccggggagcgctgcagccttgaagggccatgggtcccttatagttttc

SEQ ID NO: 10778 - DNA, 379 bp, Triticum aestivum
  Clone ID: LIB31-022-Q1-E1-D6
cttggcgctacacgttctcccaagacacgaatccagccgtgcgttgctgatcgatggaacctagctaacccgactgcgacatggctagatacgtgtcgatattcactgggtcatccatatatctttcgtggtttacatcgtcccgtaaaggaaagagtcatatgtgcggccacgcatggactgtcacgtacgaatgtagttaaaccatattgtcctcgctagccctttctttttcatttcaaaaggaaaccaattaagaatgtgtgttcgttgtgtgtgtgtatttctagctagtccaataaaggtcaaactccaagtgttacgagttatgacacgtttttgtgtttctcaccggggtttggcaatcttcgtggtaaat

SEQ ID NO: 10779 - DNA, 435 bp, Triticum aestivum
  Clone ID: LIB31-022-Q1-E1-D7
tcgtgggtcgacgtgagacactatactgagtcctactagatctccaattgctgtgggggggggggggagtagttgtagcatcccaacaatcgatacactatcaattgctaaaacgtgtgcactttgtgatgtctgataattgcagggaacgtcggatgtgattgcaaggaagtggtggaagtcacgaagaatggcggtaattctctaggcgtggcggtagctatatatgaggagtgtacttctttttgtcggactttcactagtgtaatactttcagactgtcctacgaaggttaatagagcagcacataatttagctcagtttaccgagggaaaccaaatgtggcaagaatccctcgattttctttgagatgttctagccgatgatgtaactctcatttctgaataacaaaaacaagccatgatggtttttctc

SEQ ID NO: 10780 - DNA, 332 bp, Triticum aestivum
  Clone ID: LIB31-022-Q1-E1-E1
tggaagttaattggttgtcctaacatataaccagggagcaccttgaggaccgtcctccaggaagcagtgcagacagacacaacacacaacagtactttgccatctaaagatagcagaagcattacccaatacacatacatgggcaaaggcccacagaactctcgcgcgaagaaaatagagcaccctacacacgggcgaaacacacaacaggacatggtcttgtgctaacatatgaaacaatggcccaagtagtcagcaacaacaagctgctacttcttgaacttgcgttgggttttcccttgaagaggaaagggtgatgcagcaaagtagag

SEQ ID NO: 10781 - DNA, 435 bp, Triticum aestivum
  Clone ID: LIB31-022-Q1-E1-E11
ctcgcgggccgacgtaaccatctagattccgacatctgaagcccatgtggtgatcgttcgccaacgtgcggcgcctaccaaagttgccgccaccatcgacgtccgcgaccttgcggcacctgccgccactgtggaatattgaatcgacctcatctcctatccccgttgcatgcatgtgtgtataaatccatacgctggccgagcgcacgtcgctttcactaagaaacagatcgaatgcattatggtcgttcaacttgacgatgagcagcaagccagcaacagcaaggcgtccctcagaatgtatatgcattcacatctttttgtttttgcgggaaaatagactttgttcttgcttcgatgcgtataaacgtatctctccttatgcgacgggtgatgtaatatgtcacatccatgtacaagctggtatacggaaaa

SEQ ID NO: 10782 - DNA, 393 bp, Triticum aestivum
  Clone ID: LIB31-022-Q1-E1-E12
actcgcgggccgacgtgacacccgaaagtgagtcgggcaagaagatcaccttcctagaaggaacaatctgattttttcgtcttatttgcagcgtaaactatgtacagtaatcattagaccatctttgaagatctgacgaacaaaagcagaatggttctttctatactgttcgaccccccctcccccccccccttgcgttctctcgcagggagtggctagcgcgcaacactgccatgctcctctgctgctccgtcatcacagggtgggacggcgacctcgccttcctgttcattgttctgccggtagcgacgttctttgtccaggatcatccggacagggaggtcctccaggccatgcgtctaggcatgtactgcaacgccgaccacatggcta

SEQ ID NO: 10783 - DNA, 432 bp, Triticum aestivum
  Clone ID: LIB31-022-Q1-E1-E2
attcacggatcgacataatccacaagctagcctcagacttgccttgcttgcatgatcacgcaagacgtctccacccttccaacttttaacccacatggtgggcccataacccacagttccacaggatcaaaacctgactctcctgtacacccccggtttccaaagttattccccacgcttgacttcgtatgtaatttacgggtcaccttcctaatgctcaattctggcatcagacacaataattattccgtggctttaaaaccactttcaccttctgactaggcattgaacgattgcctggctgcctgaaacttcttattgtaccttccaactttactctcgatgtgtttatttgttcaactcgagaggtactcatatgctcattcatgggttaatctcatatcattacccttataacatactaccgttgcc

SEQ ID NO: 10784 - DNA, 393 bp, Triticum aestivum
  Clone ID: LIB31-022-Q1-E1-E3
gacattagaccttatgatgggtcatatcactctatccccaaatcctcttttattccctaactatactatattattattatttatcctcttttttttctttttatcaatgggtttaagattcattagctttctcattctactctttcacaaaggaatgcgaagagaactcaatggatcttatcctattcattgaatagatttcttttttattagagtatcggcaagaaatcttggttattcactctatttttaagttttatttaagtaaaccatgcacaatgcataggactaaccccccattttcaaattttaaatttgaaatactttaattaatttttagtccttttaattgacatagatacaaatactctactaggatgatgcacaagaaaa

SEQ ID NO: 10785 - DNA, 401 bp, Triticum aestivum
  Clone ID: LIB31-022-Q1-E1-E5
agtgttttgtcaaaatattcctaactattttgactttttaataaaatattaaaaagaaatccccatataagtgcatatacaaccaggaaccaaagtgtatttccaataaagccgtggccaactcagtctctccatgaccaggacatgcaaccaattaggaactgaggagagaggaggacatgcaaccaatggagaccggagccctcaatttactatgttttccagcagaaatcgctatgcgcaaccggacgtgtacctggccacatcccccactaaagcacgtgtcgcccacctattggtccgattttggctgataagaaaagtcaaaaaaacctggtaaactaaacctgaccaagtttagtatatttagaatatatagagagaaaatcaaatctttggta

SEQ ID NO: 10786 - DNA, 393 bp, Triticum aestivum
  Clone ID: LIB31-022-Q1-E1-E7
actgagtcggattacctcgggcagggtacttagatgaggtctgtgaccctaccctaggtatatgactccatcagataccatcccatcataccacatcataatcattctaatagcatgttggcacgcaaggtaaaccattataactcatagctaatcaagcatggcacaagcaactataatctctaaatgccattgcaaatatgtttacttcataataagctgaatcagaagcaatgaactcatcatatttacaaaaacaagagaggtcgagttcataccagcttttctcatctcaataagtccatcatatatcgtcattattgcctttcactctcatgaccgaacgatgtgtataataataagagtgcacgtgcattggactaagctggaatc

SEQ ID NO: 10787 - DNA, 178 bp, Triticum aestivum
  Clone ID: LIB31-022-Q1-E1-F1
gaccgcagcatctaatcggggcgtgcacagtcggtgatccacctcgtgagtgacccgatagaaaaggaggatttcaagtacaagatcgaaatgcatacgcggattggcattctctctgtgtccgggagcaggacatcgtgcgtcgggcggctgaggacgacgtagcaggccggtgcgt

SEQ ID NO: 10788 - DNA, 361 bp, Triticum aestivum
  Clone ID: LIB31-022-Q1-E1-F10
ataacacccgaaagtgagtcgtattagacgggtgacatctggcccactaacgagctgacaagtgttcccttcggccaatcagaattttacacgtggaaatttcccattggtccgggctgtttttttcttaaggttattggtccgggctgttaacgggttatcggatccaaaatccgaccagatagcttaacagcgttcctttatggtggatgccacgtgtcggtcacccttgataaccacttctgtgatgcgcgatttatcgtaatggaagtggacatttccgtgatgataattttggtaatgtcatggaacacttctacgacagcacatgtatgactatcttgattctgtcataaaaccg

SEQ ID NO: 10789 - DNA, 414 bp, Triticum aestivum
  unsure at all n locations
  Clone ID: LIB31-022-Q1-E1-F2
aagttaccgaattcccaaacaatgagtcatactgaagataaactaacaataatgaatgaaaatgacagtggtgctgagggagtcctggattanggggtgttcgggtagccggactataccttcagccggactcctggactatgaagatacaagattaaagacttcgtcccgtgtccggatgggactttccttggcgaggaaggcaagcttggcgatgtggatattcaagatctcctaccattgtaaccgactctatgtaaccctaaccctacccggtgtctatataaaccggagggtaataatccgtacgcaatcaactccatatacaacaatcataccataaggctagcttctaaggtttaacctccttgatctcgtggtaaatctacccttgtactacccatatcaacaata

SEQ ID NO: 10790 - DNA, 412 bp, Triticum aestivum
  Clone ID: LIB31-022-Q1-E1-F3
ctagagtgagtgcaattacactagagctattcgagaatgtcgtgacggtcgctgaagcacaaaaaagttcacctagatcttcacgctcgcagaaaagtgacgatcccggatctctgcgtggacaatgagctaggattcgccaaagatcgtacgattagcaggttgacagagctcaacagcagagagtacttggaggactttgaagcagaatggcaacatcccctgcatgctgtagataatggcggcgatgtcgtacttgcataagtggcagggcttcatgtgcaaggaccgcattatagttttgttatatctattatcccgcctggcttatggaggaatgggagaaatgttggttttcctgtcagtgatgcatgtaatttcagtgtgccatgatgcaagcacttttgcatgt

SEQ ID NO: 10791 - DNA, 265 bp, Triticum aestivum
  Clone ID: LIB31-022-Q1-E1-F5
acccaagagataatcgtaataggaacttttgccaacattcgcattgtgaacaagttcttgaacggataggttggccccaaaaccgtccatgttccatcaggggagaagcttgctgtttttgatgctgctactgaaatagatgaatgaagggcatgacactatcatcctggctggtgctgattatggcagtagaagctcaatggattgggctgcaaagggtctaaatgcgtcaaggagtgaacagcttgatcgcccagtagttttg

SEQ ID NO: 10792 - DNA, 423 bp, Triticum aestivum
  Clone ID: LIB31-022-Q1-E1-F6
caaccctaaaattagtcttaataacctcagtgttgccaagatcaacccgcaggcaccccttgataaagtctgcctgctcggctgtggtgtttctactggccttggagcagtatggaatactgcaaaggttgaagcaagttccattgttgctgtttttgggcttggcacagttggacttgcagttgctgatggggcaaaatcagctggtgcttctcggattattggcattgacattgataccaagaagtttgatgttgctaagaactttggcgtcacagaatttgtgaacccaaaagaccatgacaaagcaatccaacaagtccttgttgaccttacagatggtggtgtggattacagttttgagtgcatcggaaatgtttctatcatgagggctgcacttgaatgctgccacaatggctgggg

SEQ ID NO: 10793 - DNA, 437 bp, Triticum aestivum
  Clone ID: LIB31-022-Q1-E1-F7
actcgcgggccgacgtccatcactacgatgtcctaccatcacatcgaaagacgggacacctttgcctctatcaagtggtatcagagttccaggttgctcggtgatattttacagtttttcgtagtttagatcgagtctttttttcatacctatagtccacgaaaaagccacaaaaaaaattagggttagttcatcatatccgaaccagtctgagccattgcataatcttttctgtatttgcgttgttgaatttgcagttgcatcgtcgtgtctagttgttggtcttagtgtctagtcctttagagtttcaagttctgttcacaagttgtcatgccgccgccgcatcatcatcatcaccgctgccatataccaccatcgtcatcaccgctgccatataccaccattgacatcaccgcaaccatataccacatatccac

SEQ ID NO: 10794 - DNA, 94 bp, Triticum aestivum
  Clone ID: LIB31-022-Q1-E1-F8
atgagtcatattatccatgtcgggtggccgtctgtctgggtcaagatcgccacccatttggcaacgggaggtccgttcatctggtccctcgttg

SEQ ID NO: 10795 - DNA, 370 bp, Triticum aestivum
  Clone ID: LIB31-022-Q1-E1-G1
actcgcggatcgacgatagtcccaagcatgcatttaatgaagatacccctgatctacagtcaactgcaacctcgcgtgccaagcggcgaaaaattgaggtatgttaagattatctgttgagaaatgaagagaagattattctaaccagtagttagacttcaagtagtggctttttatttatttatgtatcctctccatagaatggaatgtaatagttctgttggctcaaatgttgttaattgttggctaccttgcatttacgctggcatttgattcatctttgtgcaggtaaatcatgctctcttggaggagatcgaggagataaaccaagggctcatagacacgggcctccgtgtatgcaaggatgatg

SEQ ID NO: 10796 - DNA, 428 bp, Triticum aestivum
  Clone ID: LIB31-022-Q1-E1-G11
ctcgcgggccaacacaccacactaaagggggacgcattaagaaggatggcgatgatgagaaggaagaaggtaagaaggacaaagaagtgaaggagaagaagaaagataagaccggcaaggaagaaactaagaagaaaaagaaggatggggaggaagaaggtatgaagaaagacaaagagaagaagaaagacaagggcggcaaggagaagaccaacgatccggcaaagcttaagaagaagctggagaagatcgacgcgaagttacaagacctacatgctgaaaaggaagacatcctaaggcagctgaaggagctcgaagagggaatgaccactgaagagaagaagcctgtacagatagtggaagcgagtggcaaaggcaaagtccaaggaagatgatcctgttactggcacctgatcttctggaaatcc

SEQ ID NO: 10797 - DNA, 435 bp, Triticum aestivum
  Clone ID: LIB31-022-Q1-E1-G12
cgtcgcgggccaggtgcattcacattataattcgagccccccctaccggcctaccgctcatgtacagccactacgtacgtaccatcgacatgagactgacatcatcagcgcgcatgttctaaatggtcagcacgaatatgccattgtataactgttctatggttcttggcctagaaaagtggtgctgctatcattggcgtcgcccagaagtggcaagcacggtgccttcatgatcattacttgcacattctggccagcgtcagcaactggattgtcaccatcatcgctgttattgtcacaacctccttatttccccacctctccatcctcataatcctccttcatttcctcgtcgtcaccatcagcttctttgagtcgttgtagagttacctgccatgggaaccatcggcgcaggatgttccaaagcaactgaca

SEQ ID NO: 10798 - DNA, 227 bp, Triticum aestivum
  Clone ID: LIB31-022-Q1-E1-G2
gacgcggtgcccgagctcggctaactccatgggaacacccgacatatcataaggcttccatgcgaagatgtcctagttcccacggaggaactggacgagctcaccttcctatttgctatcaagggtggtggagatgttggtcggggaagcatttgggtccacaggatgaatgtgtactagcttcatctctcctgccgactggaaagcggattccacagtcggctttt

SEQ ID NO: 10799 - DNA, 360 bp, Triticum aestivum
  Clone ID: LIB31-022-Q1-E1-G3
ggatgggagacgtagacatcactctggctgacgctggcgctgactgaacgggtctcctcccagatgggatgataatgcttgttgatcaccaacggtgaaagggagtgaatgtttggcacctcctggtctttggatgacgcatttatggatggatggacacactgtttaaaccgttattgtatattgatgatcacttgtaggcgatcagtcatcttacacatcgaattacctttcgctgagcaatgattctgaatactgttaaatactcttatgctacctgttttcatcaacatttatacatggattttgctctaactcctccagaaatttatggggaactcacaggacgcgctacatgat

SEQ ID NO: 10800 - DNA, 148 bp, Triticum aestivum
  Clone ID: LIB31-022-Q1-E1-G4
atttatccaacatttctcttcttcaaaagccagaggccacaaaagagactgctaaggcacttgactcgaccgtagttgccgctggagaggataccaatgaacgtgaggaaggactacagccatctgaagaaagtttacctcaacaaat

SEQ ID NO: 10801 - DNA, 125 bp, Triticum aestivum
  Clone ID: LIB31-022-Q1-E1-G5
tacggtctagcattcccggttcgacaaagctagtcagtgttctgtggcagagacctgctgcttagttattattatgtcgtgccctatcgttatctgagactgggttgtggtggttactgttttgg

SEQ ID NO: 10802 - DNA, 165 bp, Triticum aestivum
  unsure at all n locations
  Clone ID: LIB31-022-Q1-E1-G6
actcgcgggctgacgagactaccaacaataagtcgtagaattgtccatcacgatgcggggcaaagtggtttgccccaagaaggtatattcatctgcgattatccgacatgatgcgagacanagtgatttgccaccttgaaaggcttaataagaaaagccttacct

SEQ ID NO: 10803 - DNA, 392 bp, Triticum aestivum
  Clone ID: LIB31-022-Q1-E1-H1
aaactgagtcgtaatatcactttgggtgggatatatgggcctggaagaagtgctttggacaccatagctaagagaaaatcttcttcgcgaagacagaagttgagggagtccaaacagtacacggcacgtatccatgtggccgacatctatcaggctatcctggctagcatgagcatcaaatctacaaggaagatatacaatgtggtggatgatgaccctgccccgagatccgaggtctttgcatttgctcagagcttgatagagaaaagaaccctgatcttgcagcggattctgcaggaccaaacagccagaacaagaattatagctgctgaaaaacgggtatctaatggtccgttgaaactggagctgggcgttaggctttcccacccatc

SEQ ID NO: 10804 - DNA, 412 bp, Triticum aestivum
  Clone ID: LIB31-022-Q1-E1-H3
acgcaactccctatattgagtcggatgacataaagccagaggcggtggagcatgatggtacagaagccgatccaagtaaagaagcatctatacctcctcaagaggaaaccactgctgtagccttggttacaggaccggaacaaaatgaagaagcagatgcacctactcaagtcaaaccagttgctgttatacctggtacgggaccagaagagaagaaagtagaggcatccacccaagaggataatgctgaagcagttgccgcagagccagaatctgctagagcccaggaaaatgcggaagcttctactcagcctagtcctatggagatagagtcggttcaggaaacagctatgctgggagaagctgaaaccaggcagcaactgccacttccgtctgccgagggtgtggtggc

SEQ ID NO: 10805 - DNA, 409 bp, Triticum aestivum
  Clone ID: LIB31-022-Q1-E1-H4
acaccagtccccatatttttcaatacaacactgctgtggctgctatcattgagaaggtcctgagtgcgaggaatcctgagatccccatccgcaaactgagggtcaggttctgtttgaggcctgatgaatgtctctccatcagccaagtcgtcgcccttgccatggtaacccaaaagctcgatgttgctgagtttgtggtcctcacggagacgatttgtttgaaatgcactgaagaccatctcctctgttatgccaagcgcttcaatagttggcttggtgattgtcctgccatgtttgctggtctcacacgcctgtggctgcgcaatatgatgtttggtgaactggacatccccaacatcctcagcgcctgtaagaggttgggatcactgcgtctctcctattgtgacgc

SEQ ID NO: 10806 - DNA, 399 bp, Triticum aestivum
  Clone ID: LIB31-022-Q1-E1-H5
tagaccctacagtgacgtcgtagtatccccatcaaggcggaacaggattcggatggctcggcccagagcacagctgatatgactgcttttgtgcaaaatcttctagttcagatgcaaaccaggttccaaactatgtcagagaacatcattacaaagatagatgaaatgggtgcaagaatcgatgaattggagctgagcatcaatgacctcaaggctgaaatgggcagcgatggtatgacccctactaaagtgaaggacgaagaatcaaagccagcagacagctctgcctgatttaagcagaagtagcagaagcaagtcgtattagtcttggttccatgtcaatatcatcagccattcatcactaacttaatgcatgtcatgagatgttagtcgcactgc

SEQ ID NO: 10807 - DNA, 439 bp, Triticum aestivum
  Clone ID: LIB31-022-Q1-E1-H7
cgcgggtcgacaggatgcgataacgagagtcgggggagagagaacgagagaggtggccatgggaggaggaatggatgcgttttggggaactcgagtgatggaattagtgaagaagcacgattccggtggtcttctttggaagcggatcaagctaacccctactcgtaaagccaatgccaaaacccccctccgtcgtgtttggcagaatgaggctgttctaagggcgtgtggtgaatcagatgcaccaaatccgccgggagctagcaacacaaaaagctctagcaatgcggtgaaaaatgcgtaaggccgaagagaagctagtcctagtttgtaaggactcgtagattaagtctctgtcgttacctgattttacaaaaataatatttgaaccttgtgtttggttaatagttttgccaaagaagaggcacctccacaccaa

SEQ ID NO: 10808 - DNA, 374 bp, Triticum aestivum
  Clone ID: LIB31-023-Q1-E1-A3
gagcacaacatatgttgagctgaccgaggttaccttaaactggatcaaccacctaaaatgaggcccctgaggatcgtcgtctaagcccatagcatctggaaacgcaactagaaaacgggcctggatcattgctagccagtcagattatgcctctaaaggacctatggcagtaccggccaaagcaccccagcaagtaagacacatcatgtagagtacgagccatctctccccaaggaaagtgaaacctgcgtgtcctcgatctccatctatctgctaagcaggtaaggagtgacctgtcctaagagaaacgtttcacttgcctcatgcaaaactgcatcggttcaccttcctcatccttgtcccggtgttcaact

SEQ ID NO: 10809 - DNA, 407 bp, Triticum aestivum
  Clone ID: LIB31-023-Q1-E1-B1
ggtcgacgcaattccctgtagtcactcgtatgactgtttctctgagattctaccgtgtggtgcgtgtgccccctctcggaagtcccagccgtacgacaagcacagggctccgcggcctcgcaagggactcttcagctgctgtttctgcaagatcaggccggactgcagaacgaaagctgacgctgtgtacaggtctgaaacccacgaggtgttccatgggtagcgagcatgttgtagcttaagttaggagagatgagcaccgttgaaacaaggctgataatgttctatcattttggtacggatgtgggtggccaaattccattggaagttagatcaatttacgccagtctttgaactgcagcctgctcctgagttctgactctagatgtgcatcctagatgtcagag

SEQ ID NO: 10810 - DNA, 415 bp, Triticum aestivum
  unsure at all n locations
  Clone ID: LIB31-023-Q1-E1-B11
tggctgacgagcctgcagattctgattgcttgaaacactttgatgttctgcagtgccctccggaccatcactaccttgaaaacatagcacatggtaccggtggaagaaagtgggtcaaaaaagttcagcaagaatggggcatacttgagaagaatctaccagattatatttatgtcagggtatttgaggatcgtatggatctcatgagagctgtgattattggagcaagtggcacaccataccaagatggtctgttcttctttgacttctaccttccacctgagtttccacaagctcctccgtcggcatactatcattctggcggcttgcgtgtaaatccaaacctttatgtggatgggaaggtttgtttaagcctcttaaatacttggactggcaganggaatgaagtatggga

SEQ ID NO: 10811 - DNA, 422 bp, Triticum aestivum
  Clone ID: LIB31-023-Q1-E1-B3
cgggtcgacactatctgacaacccacatcaatgcttcaaagcgagagagattgagcagggtggtgtacgagttcatgagtaaggacagaggttcccaattcgagtgcgagtgcgggcattttgaacacacaggcatgctatgttgtcatgtgaaagggaggacagtggcgtgtacattgtgcactacggccgcgagttcactgagttgtgcctccggtcaccgctgagcagggtaagatgcaagaacagcagcctggaaacctggaagatgcaagaacagcagccttgaaggtcactgccggtacacctgcaccacaccaggcctcctggagggcctctgttctgaagtgcatttgtgtagtgtggcgatttgatttgacgattttccagtgtgttcggtgagctctgctccacccttgttc

SEQ ID NO: 10812 - DNA, 369 bp, Triticum aestivum
  Clone ID: LIB31-023-Q1-E1-B4
gcgggtcgacgttcatctctaaactgagtcggaataacaacatacataccatcaaaatatcagacacatatcaaattcacaggaaccggatgaagaccagtttcatcgcgatgatgctcatcgtgatgaccgcagctctcctctatgtgatggtagtttagatgatcgatatcgacctgtaatgtgaagacaaactcgctactcgcggtctcgagacttgtaatgttctaactttgttcggtattttgaattccgagactaatatgatgaattgtattaggagactaatcgtccattgtattcgataaatctgttgtttacatgttgtgctatctatattctgcgtagtaatgtattttttaccctgtg

SEQ ID NO: 10813 - DNA, 412 bp, Triticum aestivum
  Clone ID: LIB31-023-Q1-E1-B6
ctcgcgggtcgacatggcacgcaagtctgagtcgtatcaaaatgcgtctgcactaaaaaaagattgctccttatatgatgcgggcaaacacaggattgcatggtgatgttgccctgggcgccgaccaagaaaagagcaaaacattggctctgtacaaaacagtttcgtacatgcacgactcatgttcggtgaaatgtgtgtgtgagctagactagtacaatacttcttgtacgtgcacttgtgtatgattggagtgttatgtagtttattttgcaccgtaccctttctttacatttttgagaattgtcccctttctttcctcatatatagtctccagctccaaccaaatttaatttcatagaagttcaaagatgaccagcatagaaggtcatagaaaaaaaacattttttta

SEQ ID NO: 10814 - DNA, 417 bp, Triticum aestivum
  Clone ID: LIB31-023-Q1-E1-C10
gcgtgtagtgcttggtttttgatgacttgtagatttttgcaataagtatgtgtgttctttatgactaatgttgagtccatggattatacgcactctcacctttccatcattgctatcctcttcggtaccgtgcattgccctttctcacattgagagttggtgaaaacttcgccggtgcatccaaaccccgtgatatgatacactctttcacacataaacctccttatatcttcctcaaaacagccaccatacctacctattatggcatttccatagccattccgagatatattgccatgcaactttccaccatctcgtttatcatgacacattcatcattgtcatattgcttagcatgatcatgtagttgacatagtatttgtggcaaagccaccgttcacaattctttcatacatg

SEQ ID NO: 10815 - DNA, 411 bp, Triticum aestivum
  Clone ID: LIB31-023-Q1-E1-C3
gggtcgacacgaaagcgaaaacttagacgggtgaccttgggtaaggtacttagatcaggttcgtgaccctaccctaggtacatgaccccatcagcatgcgcgtagtacctgatttttgacgacgtctaaatttttgcaataagtatatgagttcttttgactaatgttgagtccacggattatacgcacttttacctttccgcctttgctagcctctacagtaccgtgcagtgccctttcacagcttgagagttggtgcaaacttcgccggtgcatccaaaacccgtgatacgatacgctctatcacacaaaaacctccgtatatcttcctcaaaacagccatcatacctacctattatggcatttccatggccattccgagatatattgccatgcaactttccaccattc

SEQ ID NO: 10816 - DNA, 278 bp, Triticum aestivum
  Clone ID: LIB31-023-Q1-E1-C5
tccggcatgccattaaaatcgcatactcccgttctgcacatccctgctcttcctgagggcaccgtcgtggtctcaacatagcaagaagagcggcacggctggatccgcgaaagagatggcattttcctctgagcacactcacccttgacattctcccattgaaagatctgcggtttacgtcagctctggccccattgagggtgtgcgctaattttctctggcaaaggctgtagcttccagagtgctaatgccaaagcctgagacttgagagtgttatt

SEQ ID NO: 10817 - DNA, 370 bp, Triticum aestivum
  Clone ID: LIB31-023-Q1-E1-C6
actcgtgggtcgacatcactacccacagtcaggcttaagagggagattgtgggctccaccctgtctccggatggacttgcatatttgcttagctaaagaagtaaaaggcaggtgagcggcctcgtggcggacatttgcaaataacattttcgtttagtgaaacttaaaacacaagtgagtcaggaaaacaagtttattttattgcaccacagaaaatacaatttttacaaaagttttgagtgggtactaaattttgtaacagatgcagtacaaataaattcctagtttttttatcatataggacaaattagtaattactaggagaagagtacaattcaaagaaggcagagtcaatcagtagctcgtttcc

SEQ ID NO: 10818 - DNA, 434 bp, Triticum aestivum
  Clone ID: LIB31-023-Q1-E1-D2
gggtcgactccacaaaataaatagagaccaactcatcgaaagatcgggacaccctcgcctctatcaagtggtatcagatttccaggttgctcggtgagattttacagtttttcgtactttagatcgagtctgttcttcatacctacagtccacgaaaaagccgcaaaaaaaaattagggttagttcatcatatccgaaccaatctgagcctttgcataatctttttagggtttttgctttgttgaatttgcggttgcatcgtcgtgtcaagttgctggtcttagagtctagtcttttagagtttcgagttctggtcataagttgtcacgccgccgccgcaccatcagcatcgccttgccatctaccaccattgcttatccgtcaccgccttgaatccgtaaccatataccaacaacgctgtcatatagcaccac

SEQ ID NO: 10819 - DNA, 410 bp, Triticum aestivum
  Clone ID: LIB31-023-Q1-E1-D6
gaatgcccgtgcgttgctacggcctacaatggatagagaaattagactacaatgattaaggtcatctcttaggtcaaagcatatttctccttcatatgtccatgcgtgttcggacattaaacaggctcccaaaattcaactgtttggatagtttggctcttcaaatccagaccatacgtggaggagaaaaatggtcttccggactatctgccatgtcacgtaggtccaacaaaaaaaaccaccccacgatgtagccttcccttttcctgttggatccccccattccctttcggtttccatcatagcggaacatttcacgttggagccctctcctttaaaactggatgacacccatctcacattcgccgtgccgtcctcgctcctttacactgtactttcccatgggacgc

SEQ ID NO: 10820 - DNA, 298 bp, Triticum aestivum
  Clone ID: LIB31-023-Q1-E1-E2
tgaagataacgttacgcaatgtgttgactcaagacttggaggggactatcctcctaaggctgttgcaaagtttgcagccgtcgcggcattgtgcgtccaatacgaagccgacttctggccaaacatgagcatcgtcgtcaaggcgctctagcccctgctgaatgcgcgagcagcccaccctggggctgagcatgccggacgctaaactccactccttgtatgatataatagataaggaaaaatgagccatcaattgttgttcttgcggggcgcgtggcaagcggtttttgtacatttg

SEQ ID NO: 10821 - DNA, 416 bp, Triticum aestivum
  Clone ID: LIB31-023-Q1-E1-E3
gggtcgacactatttgttcaattgaatattgtggcgaatttgctttttgcgtgccgattcaaaatgggatatttttgttttaacctggcaattgctccgcacacggttcaactaaatgagtgtgtgtgatccacatcggaaagcatatgtcaatcctattggaaccgtcggtgatacacagtagatcgcaaacgattcccagcgctattatgtgtgcgtaggttctccggaaccgtttgtgatatcgtgttatcgcacacgagaactgggagtaaaccgtggccaatgcaaaatacaatcccagtcgtatttattgtaggaaacgtgtgggtcccaaactaaaagcacacgtcactcttgcggcaaccgtcggtgatacctaacaaatcacaaacggtctgcagcacttgtatgtg

SEQ ID NO: 10822 - DNA, 400 bp, Triticum aestivum
  Clone ID: LIB31-023-Q1-E1-F4
gccccaaaccccagacgaaaccctagcctgcctcccaggagcgccgagtccctccgcccccaacagatctacgcgcgcgaggttcggttcggtcttcggagctcgagacatggcggaggagaatgccccagttgaggttgccgctccggttgcggcccctaccccagttcttggagagcccatggacttgatgactgctctgcagcttgtgatgaagaagtcaagcgctcatgacggccttgtcaagggacttcgtgaagctgcgaaagcgattgagaagcatgctgctcagatctgtgtgcttgctgaggactgcgaccagcctgattacgtgaagctggtgaaggcactgtgtgctgagcacaacgttcacttggtcactgtgcctagtgccaaaact

SEQ ID NO: 10823 - DNA, 233 bp, Triticum aestivum
  Clone ID: LIB31-023-Q1-E1-G1
gggtccagcgcggagcttgaaaggtagtcgaagaacggatgcagattgtcgtctgcatcgatgacatctgaaagacggaatgtgtgctacgttcacggctgagtggatggcaagtgtggattcctccctcggagtcttagtcgtggtggggtggcagatcttgagttcgatggcgtgtccggggtggtgcccccgattcgagtcgttcagagacagtgacctcacctttggga

SEQ ID NO: 10824 - DNA, 240 bp, Triticum aestivum
  Clone ID: LIB31-023-Q1-E1-H1
cgggtccaggctatcctccaaacggagtcgtacaacaccgaccaccccctattgcaattgcaatgacagagctgaaaaagacgaggcgaacggcggcagcgtggtgtttctgccacatgattttcattgcaaactttctgcaacatcacgtgtgttgcagaaattccttccgcaacaactcctgtgttgcacaaaaagtgaagataaagaagtccgcagcatctttgtggcaaaaattct

SEQ ID NO: 10825 - DNA, 360 bp, Triticum aestivum
  Clone ID: LIB31-023-Q1-E1-H12
acagtacaccctaaaatgagtcgtcatacttcaagcataacatccacgacgagtggcttgcccggcacctgggacaggaaaagccgaaatctatggcagccctcacaacactcatgacacgcttttgcacggaagaagacagctggctagctcgcagtaacaacttaccagagaaccttggtaattcggataccaatgacaaaagtggcacgacacgccggaataagcaaaaacgccgcatttacagcgacagcaatgaagacacggcagtcaatgccggattcaaaggctacaaatccggtcagcggaaaaagcattcacaaagaatacttatggcctgtcgagtttggaccgaatact

SEQ ID NO: 10826 - DNA, 398 bp, Triticum aestivum
  Clone ID: LIB31-023-Q1-E1-H3
gggtccaccctccgcatgaaggttggaagcaaatgcaagttcataccaaaagatcgttaacaacaacaccaacttgcggatgacaaggtagtacaactaccaataccaaacaaacttataatctttttactcctggccctagtgttcgtctggtagaaaatcttgcagaggaccaactcccactccttctcttgctccaggtccccgaggtggtactggtgcatcacccagttggtcctctactggtcgaagttcttgttggtgtgctgcaccagaaccttttttgctgcccgttagccggccgttgaccatcaccggcaaggtattgccggtcttgtgccacatcgcgtgcatgccgcactacgacggtatcttgcaacaagtccacgtgccccttt

SEQ ID NO: 10827 - DNA, 419 bp, Triticum aestivum
  Clone ID: LIB31-023-Q1-E1-H4
tcataggaagggcatcaacactgtcaattgcagaggcttggacctgcttcggcatccagtagagcaaacaagaaggtcaagccggaaacaaatatttcatcctcgttcggacttctcatctcgcaatggaagccaagttctttcggttcctgaagcttgttggagttggcttcaaagccaggacagagcgcgaaggccgcgagttgtttctgaaactgggctacagccatgaggtgcagttcaccgctccacctgccgtccgcgtcttctgcttcaagcccaacataatatgctgtactggcattgacaagcatagagtgcaccatttcgctggagctgtccgatgcagtaaacctccagaagtgtacaaggggaagggcatactgtacatcgacgaggtcataaagctgaaacccggg

SEQ ID NO: 10828 - DNA, 404 bp, Triticum aestivum
  Clone ID: LIB31-024-Q1-E1-A2
cgggtcgacacttctccacatacacaagcatacccaccaacctccaaaggctgctactgagctcaatgtccactgccaatttgccatgttgtcagatagctttggaaaagtgtttgtcaaatcttaagtatctcagaggtttgcacaagcattgctgctgcttggtccataccattatctcacattcttcactgctgttaaccactatcatgtcctgagtctgccaacactattgcttgcctcctatcagaggaggtttctacgggcaaaatgtataatgtgaagaaggctatcaggagcatacgcaagacgactgacatcattatgaaagcgtccgcggctgcataatggaagatgctcagtctttttgtcatccatcgtcgattgacacgcctctgtggatt

SEQ ID NO: 10829 - DNA, 454 bp, Triticum aestivum
  Clone ID: LIB31-024-Q1-E1-A3
gggtcgacacagccgtagccgtcttggcaaaccttgccacaataccagaagggaggaccgcaatcgggcaggcccgtggtatcccagccctcgtcgaagtcgttgagctgggttcggcacgggggaaagaaaatgctgccgcggcgttgcttcagctatgcacaaacagcaataggttctgcagcatagttctccaagagggcgccgtgcctcctctagtcgcgctgtcacagtcgggaacacctcgggcaagagaaaaggcgcaagctcttctcagctatttccgcagccaaagacatggcaactcggcgaggagatgatgatatgatgttagcatcataattttgtagtgtacatgaagcatttcccgcgaatggcagttaaatttgttgactggctggtgctgtgcactgtttgtttatagtcagattgagagagattgtgctcatcatcc

SEQ ID NO: 10830 - DNA, 435 bp, Triticum aestivum
  Clone ID: LIB31-024-Q1-E1-A4
cggggccacccgctttttttaattattttttttttttttttttgaacaatatggcatgcgttctgcttcttatacattatgatctgaaacagatcaaccaactcaccttgtgccaaacgcccagacataacaaaatttccatgcgctgccatggatgctcattcgacaggcgagccagacctttggttacagtacaagaattgttgcctctagacaagcatctgctggtaaggcaggggaaaaactgaagagtcagccaggcttacgtgcaaggcgacatcaatcaagataaatagctagaggagaaaaaaaaatgcagcagaggtcatcagtgatactctgccaaaaaaaaatgggttggcttagcattgccgaaccaactgtgcatctcaggagatgcctgccatgccactgaacacatcatggtcaatgtgg

SEQ ID NO: 10831 - DNA, 400 bp, Triticum aestivum
  Clone ID: LIB31-024-Q1-E1-A5
gtccacctctgtaaataaagggacgacctgacggtgattcagggcatgtaagatcagaccgagagccaggtcaaacgatttcgctccctggtaatcgagacataagcaatcccactcaaaactggatcgtaggcttttaccttcaccttaaggggccgaccagtataaatcccgtgtcctttgtcccgattaacccctttaagtttcctaattgcgatggctccctcactaagtccttccactaggacatctaacgtgacaattccatgacacccatcctcctcctccttccacaacccgcacaccccgaccgctggtgcaacacttccacacaaatcaccgacccttccaccacataagcgcctccctaaacctatggtggacacagtatagacaggat

SEQ ID NO: 10832 - DNA, 429 bp, Triticum aestivum
  Clone ID: LIB31-024-Q1-E1-A7
ggtccacgaacctactcaaaatgaagatgttgagccggctgccataaagccagaggcagtggagcatgctggtacagaagctgatccaagtaaagaagcatctatacctccacaagaggaaaccgctgctgtagccttggttacaggaccggaacaaaatgaagaagcagatgcacctactcaagtcgaacccgttgccatagtgccagattccatggagcatgctagtacccaagttgatcaaagtatagaaacagctgtgcgtctcccagacgaaacttctgttatacctggtacggaaccagaagagaagaaagtagaggcatccccccaagaggataatgttggagcagttgccgcagagccagaacctgctggaacccatgaaaatgcagaagtttctactcagcctagtcctatggagataga

SEQ ID NO: 10833 - DNA, 475 bp, Triticum aestivum
  Clone ID: LIB31-024-Q1-E1-A8
gtaccggacgtacattcccgggtccacatggccaactggtttgctgccatggtcatggacaaggcgtatgacggttttgagaaggcatactctttcaatgcaacagcagagggcaataacaccatctttatgcagggccttgaggggctcaattaccttgtgaagcagaccaacatgagcgggtcggattacctcgtgccgggaaagcagcaatcagtgctctcattcaccaagaagctgactcctgatatcgatgttgtcgctggagatgggttcccaacaaaggtcttcttcaatggcgacgaatgtgctatgccgcagaggttaccaatcaagagtggtggattcaggacccatctaagcagtgcctttgctttggtattgctcatggctgcctcggccttgctgttgcttcagcaataatcttgttgctgttgctccgattctttgattccttcaggtggttccatcagcg

SEQ ID NO: 10834 - DNA, 419 bp, Triticum aestivum
  Clone ID: LIB31-024-Q1-E1-B1
cgggtccacgcggcgtgtcgaacccaaattcttggctgccgctgagggaggggggcgcggcgagaatttcggccaggccactataccacaccaaggtaactggtttttgaaaagtttgtgttttaaatttttttgtttagaattttagaaaaatgtccatgttcacaaattttgttcataaattaaaaaatattcaggaatttcagaaaccgctcatgttttaaaaaaattgtttgcattttcgataaatgtttgaaaaattcaacaaaaatgtttgtatttttagaaatttgtaaacattcaaaaaaaatgttcatattttaaaattgtggtcaaaacttgttcagaagttgaaaaatgttcccgttttaccttttggtcacaaactaaaaaatgtttcgtatttttcattttttttt

SEQ ID NO: 10835 - DNA, 472 bp, Triticum aestivum
  Clone ID: LIB31-024-Q1-E1-B2
ggtccgaatatccgggtcgaccagattgtcattctgggcaccgtatttcgacacaatatgtacgcctttgagaagttcatgggagtcctaaagaaatatgtccgtaagcgcgctaggccagaaggaagcatctccatgggccatcagacagaggatgtcatcgggttttgtgttgacttcattcctggccataagaagatagatctcccgaaatcgcggtatgaggggagactgactggaaaaggcacgcttggaagggactcaataatatgtacggacggatattcttggtctcaagcatgctacacggttctacagaactcgaccatggtgaccccgtatgtccgtgaacagaagaacagtctgcgctccatacacccggagcaatgcgacgactggattacatgtgaacacatcaggactttcagcagttggttggaaacacgtctcagacgtgacaacactgtttgtg

SEQ ID NO: 10836 - DNA, 421 bp, Triticum aestivum
  unsure at all n locations
  Clone ID: LIB31-024-Q1-E1-B3
gggtccagccgcttttttttattattttttttttttttttttgaacaatatggcatgctttctgcttcttatacattatgatctgaaacagatcaaccaactctccttgtgccaaacgcccaaacataacaaaatttccatgcgctgccatggatgctcattcgacaggcgagccagacctttggttacagtacaagaattgttgcctctaaacaagcatctgctggtagggcaggggaaaaactgaagagtcagccaggcttacgtgcaaggcgacatcaatcaaaataaatagctagaggagaaaaaaaaatgcagcagaggtcatcagtgatactctgccaaaaaaaaatgggttggtttagcattgccgaaccaactgtgcatctcaagagatgccctgcatgnncatgaacacatc

SEQ ID NO: 10837 - DNA, 448 bp, Triticum aestivum
  unsure at all n locations
  Clone ID: LIB31-024-Q1-E1-B4
cgggtccacttccaccaaagcgatatccatcatctcatcgaaagacgggacacctttgcctctatcaagtggtatcagatttccaggttgctcggtgagattttacagtttttcgtagtttagatcgagtcggttcttcatacctacagtccacgaaaaagccacacaaaaaaaattagggttagttcatcatatccgaaccaatctgagcctttgcataatctttttagggttttgctttgttgaatttgcggttgcatcgtcgtgtctagttgctggtcttagagtctagtcttttagagtttcgagttttggtcataagttgtcacgccgccgccgcaccatcatcatcacccctgccatctaccaccaccgcttatccgccaacgcttcgaatccgtatccatataccaccaccgctgtcatatactancaccgctggcatcta

SEQ ID NO: 10838 - DNA, 432 bp, Triticum aestivum
  Clone ID: LIB31-024-Q1-E1-B7
attcgcgggtccacattgagccagaaatgcatgtcaagagggcgatgaatgagatcaatgcagcttctaggatgaggtcggcagccaatgacaaagcagaggccgaaaagattctccagattaaacgagcagagggagaagccgagtcaaagtacttggctggtgtgggcattgcaaggcagcgtcaggctatcgtggatggtctgagagacagcgtccttgccttctcggagaacgtccctggcactactgcgaaagacatcatggacatggttctggtcacccagtatttcgacaccatgaaagagattggggcctcatccaaatcttcttcggtgttcatcccccatggtcctggagccgtcaaggatgtcgcatcgcagattagagatgggctcctccaggccaatactctctaagtgagggtcatgg

SEQ ID NO: 10839 - DNA, 451 bp, Triticum aestivum
  Clone ID: LIB31-024-Q1-E1-C1
cgggtccacttcgccacaagacaatctgccaccacctccgccgattttgccggaagaccatcagccgtcacctagacctactttggttcagaaaatagatgacaacactgtaacttaatattacacagaacattgaggaggactttgataaccgaccttcaaaaaaaagcaaaaatttctgaatcaagtgttctggagccatcacctatgtcaacatgtactccagtttctgagtgttttgaatcgattgtgccaaaatcagataattagatagatccgtgctccattgccatcacctccatccccatctagctcgacattatctcaagaacatcggtcgagccgtacaaatggcgcctgcagcggctacaccagaggtatttatccccttgatgaaagctaatcactgcatgtaatcccctgtttagttgttgttctggcctggttatac

SEQ ID NO: 10840 - DNA, 460 bp, Triticum aestivum
  Clone ID: LIB31-024-Q1-E1-C2
ggtccgaatatccgggggccgccttttttttttattatttttttttttttttgtatagttatcacgagaagcatatgtcaatttcattatggactttggcaatgatacgttgatgttttgactacgacgcgatcctacatggatcagggagacacacgcgaccaacaagtaatcaaagaaaataatggcccagagatagtttctcgggacagcaacacaatcttctgcatgcaagcagtggatactagcatgggcttcggatcatcccatggcatacttctgcgtccagctgcgggctgtcgtctcgtacttggaccgatccgtcttgtacatgtgggcaatctcagggacgagagggtcgtccgggttagggtcggtaagcagtgagcagattgaaagcagaaccttagagattgtcaaagcatgactccattgctccttcagaatgtcgaggcatatg

SEQ ID NO: 10841 - DNA, 415 bp, Triticum aestivum
  unsure at all n locations
  Clone ID: LIB31-024-Q1-E1-C3
cgggtccacacgctcttatccagagagctcggcagcgaaatgctccgaagaggatgaggatgaaaacataccattatctgaggatgcattgtatgagatgaaagattggggtagccctgaaggtgagctacaaggcatggttttggacattgaaagatccatcttccgggacctcattgacgaggtcataggttgcgaggctacagagaggatgcaagctggacaatggaaactgcgtaagcagctgtctttcagtagtataaactgaatacgactggcgatagtcgttgtttccattangaggcttagccactagtataaatgtaaccctttgtatttttctgaaaactgaattatatagaagaaatataattattcctggaaaaaaaaanaancatagaaattgtcaaagcaa

SEQ ID NO: 10842 - DNA, 450 bp, Triticum aestivum
  unsure at all n locations
  Clone ID: LIB31-024-Q1-E1-C4
ggtccaaatatccgggtccacaacagcgggacgatcgttgggatcaaatgcaaagatggaattgtccttggtgtggagaagctgataacatcaaagatgatacttgctgggtcgaaccggagacttcattccgtgcaccggaactctggcttggctgtggctgggttagcggcagacggtaggcagatagtctcaagagcaaagtcagaagcagccaactatgaaaaggtatacggagaacccatgcctgtaaaggaattagctgatcgtgttgctagctatgttcatctgtgtacactctactggtggctcaggccttttggctgtggagttattcttggaggctatgatanggatgggccacagctctacatgatcgaaccttcaggcctctcctataaatattttggtgctgctctgggtaaaggaagacaagctgcaaaaacggag

SEQ ID NO: 10843 - DNA, 460 bp, Triticum aestivum
  Clone ID: LIB31-024-Q1-E1-C6
ttcccgggtccacagaagtatattaaatatacattatattaatgtgtactttacaagtactcctaataacaccagggtattagataccggttcggttgctaagtgttagtaagtcaaaatataagctgtggaataaacggagactagctaaaggtgagatgacgatatgtgttggaagtgtttccaaggttgatgtgatcaagcatcgcatgctccctctaccatcgagattggggttaaacctgtataattagtatttggtgtatgcgttgagcatagacatgattggattatgtttatcgcaatatggttattcattagaggagaataatggatactctgtctatttgaataataccttcaatggtcttgcaactaagatgaatggtttattgaatctcgatcgtagtgatacacatgttcatgcaaaaacatatagatagtaatgatactaccacat

SEQ ID NO: 10844 - DNA, 371 bp, Triticum aestivum
  Clone ID: LIB31-024-Q1-E1-D1
cggtccgagaatccggggccacacgaatcgtcgaagtacctggatctggatttggccaggttcctggcacatggcacttcaggtgcacgatccttccgcaggaggagaagatcccggcaatcatctcccgcttcacggtgttccatgagacgttcatggcagagtaccgtgactaaactggtgtaacatgtgtgggattacatgcaagcctcatggattttccctaggcgtttttgcccgcgttgacagcagtatcctgtagatgagacaaaataaagcaaatccatggcttgtgtgtgtgatactatatcagattaccagtctgatgcctttgatggcaaattggcaactgagaatttttatttccacct

SEQ ID NO: 10845 - DNA, 456 bp, Triticum aestivum
  Clone ID: LIB31-024-Q1-E1-D2
cgggtccacactgcaccataaaacaaagcatctctactctaacattgagtcctctcgtgattcagtggaacaccattataagttcacaacaccagaatgaatcatgtcaaaaggaagcaccatgcaagctcataatacaatacaattaacatttaacaccttgcaataaatatttgttctgttgacagtcacaccatgctgataataaaacaacttttgatggacaaaccgcaagaggaaaaatatggtgtctttgcattttgtgccaagaagagacataagagaaaaaaaaggaagaacaaacagagcaaaaaggagaagacacaattatgtggcagacaggtacagatacatctcacatgttcttggcttcttctttcttatgtatataacaagatgagacttgggactgactgactggaaaagagaagatcacaaacaaaatgacttcactga

SEQ ID NO: 10846 - DNA, 460 bp, Triticum aestivum
  unsure at all n locations
  Clone ID: LIB31-024-Q1-E1-D3
gggtccaggccaagatcatggagatcgcgtcgcttgagaagttcctgcaggagcgcatcaaggtcgccgggggcaaggccggcaacctcggggactccgtcaccgtcgcccgcgacaagagcaaggtcaccgtcacctccgacggggccttctccaagaggtacttgaagtacttgacgaagaagtacctgaagaagcacaacgtgcgtgactggcttcgggtgatttcatccaacaaggaccgcagcgtctacgagctccggtacttcaacattgctgagaacgagggcgaggaggaggactagatgtgcactgccttgtttctgtgccgtgtgaaactttgaacttgttggagcacttctgcagtagagttttgatgtntatgtnttcacccctgttttgaattgtggccaggacgccatgtgatggatgcttagataaccaagctgaagaattgtcc

SEQ ID NO: 10847 - DNA, 433 bp, Triticum aestivum
  unsure at all n locations
  Clone ID: LIB31-024-Q1-E1-D4
cgggtccactccgaggaactcactgtggaggagcgcaacctcctctctgttgcatacaagaatgtgattggagcccgccgtgcctcatggcgcatcatctcctccattgaacagaaggaggagagccgtggcaacgaggaccgggtcacactcatcaaggaataccgtggcaagatcgaaactgagcttagcaagatctgtgatggcatcctcaagctgctcgaaacccaccttgtcccgtcttccactgcccctgagtccaaggtcttttatcttaagatgaagggtgactactacaggtatcttgccgaattcaagagtgggcctgagatgaaggatgctgctgagaaatacatggtggcatacaaggctgctcaagatattgctttggctganctggctccaactcatccgattangcttgggctggcac

SEQ ID NO: 10848 - DNA, 457 bp, Triticum aestivum
  Clone ID: LIB31-024-Q1-E1-D6
taccggacgtaaattccgggtccacttccaccaaagcaatatccatcatctcatcggaagacgggacacctttgcctctatcaagtggtatcagatttccaggttgctcggtgagattttacagtttttcgtagtttagatcgagtctgttcttcatacctacagtccacgagaaaagccacaaaaaaattagggttagttcatcatatccgaaccaatctgagcctttgcataatcgttttagggttttgctttgttgaatttgcggttgcatcgtcgtgtctacttgctggtcttagagtctagtcttttagagtttcgagttctggtcataagttgtcacgccgccgccggaccatcatcatcgctcctgccatctaccaccatcgcaccgaatccgtatccatatagtagcaacaatccgtgtcgatataccaccaccgattcatatccatat

SEQ ID NO: 10849 - DNA, 424 bp, Triticum aestivum
  Clone ID: LIB31-024-Q1-E1-E2
gcgggtccacactattcacgaaagtgagtcttatgaccctcttggggacatctccttggcctctcccagtaccccttttaccaacaatcagggtgaaaaatcctcctccgtctcaagcggacatggcgtggagcactttttgaatttgcgaacactttttgaattcatggacatattttcaattcacaaacatttgaatttgcaaagatcttttgaaattcacaataattttctagattcacaaacaatttttgagctcaagaacatttttttgaactcgtgaacatttttataatctgcacctttttaaatttgtaaacaattatagttttagctcaagaacatttttataatctgcaccattttaaatttgtaaacaaatacatttgttagctcaagaacattttttgaattcgtgaacatg

SEQ ID NO: 10850 - DNA, 462 bp, Triticum aestivum
  Clone ID: LIB31-024-Q1-E1-E3
cgggtccactgtccggacgctaaagccttagcggctttcagccataatgtccgagacgaatggctcgccagacacctcggccaagaaaatccaagaacaatggccgcactaacaagactcatgacccgcttttgcgcaggagaagacagctggttggcaagatgcagcaccagtgaaccaagtacatccgaagctagggatggaaacggaaaaccacgatgcaataaggaccgtcaccggactaaagaaaaaaatccgaagagcacggcagtcaacgccggattcaaaagctcacgacataatcagaaaaagccgccctccaagataacagggacggcctatccaacctaaacaaaatcttggataggatatgtcaaatacacaacactcctggaaagcctgctaaccatacccacagagattgttgggttttcaaacaatccggcagactcaacgccgaac

SEQ ID NO: 10851 - DNA, 426 bp, Triticum aestivum
  Clone ID: LIB31-024-Q1-E1-E4
ggtccaagatacccgggtccacagttgtccacttacacaagcacacccaccaacctccaaaggctgctactgagctcaatgtccattgccaatttgccatgttgtcagatagctttggaaaggtgtttgtcaaatcttaagtatctcagaggtttgcacaagcattgctgctgcttggtccataccattagctcacattcttcactgctgttaaccaatatcttgtcctgggtctgccaagacgattgcttgcctcctagcggaggaggtttctacgggcaaaatgaagaaggtgaagaaggctatcaagagcataggcaagaagactgacgtcattaggaaggcgtccgcggctgcttaatggaggatgctcagtctttttgtcatccatcttcgattgactcgcctctgtggatttggtggcgt

SEQ ID NO: 10852 - DNA, 471 bp, Triticum aestivum
  Clone ID: LIB31-024-Q1-E1-E7
taccggacgtacattcccgggtccacacgagaaaaaaacttcaaagcaataagaggcaatggatattgtttcgtccctgaagatgggacgttccctaccgaaaaccatcatgctttttgtgagaagctccggtttgtgagaagcatatacccaaacctgccccaaatgggacaaaaattttaccacggcatgttgatgccgctccatgatagcatgccaagtttcatgaatttcagaatagttttggatttactagaatttaaaaaccaggcatctcaatgttatgccggcaatcaacggtgctatggtgtttgaaattcattcacatttcttgcatgggacataagcatgcacccaaggacacagattatatttttcaaccaatttatatgcagtggcgcatgcgcatgtagttcaaatttgaattattcacataaatgcattgaaaactcagttaatgcataaaaatgt

SEQ ID NO: 10853 - DNA, 458 bp, Triticum aestivum
  Clone ID: LIB31-024-Q1-E1-F3
cgggtccacccataagtaccaagtgattccatctccaatatgacgtcaatatctaaaatctctctacttggggaaatccatcaacggcgtctactgtgcactaatctttaattcagaggaacggctacggatttggctacttaatgatgatgaggtacgcggtcaaacaaaatgggtgctcaagaatgacgtgagcattcaaccactcgtgggaataacacatcaacactttggccttcaaaacaatggactttggactttgcaaaacacttcctacgaaccaatggcggagcagaaatttgaatgggatcctgacagcgacatcacccttgaagctgaggctaaggctccaatagatcaccttcatgatgatattcgtaccctaagatttcatccttacaaggagattctcttcttatggacaaattgcaaaagagtagtagcttaccatttgaaca

SEQ ID NO: 10854 - DNA, 449 bp, Triticum aestivum
  Clone ID: LIB31-024-Q1-E1-F4
cgggtccacccggccgtcggatccaaggccgcgcacacgtctgcaggcagcaagaagatcgtgggcgtgttctaccaggctggcgagtacgccgacaagaaccccaacttcgtcggctgcgttgagggcgccctcggcatacgcgactggctcgagtccaaggggcatcactacattgtcaccgacgacaaggagggcttgaacagcgagctggagaagcacattgaagacatgcatgttctgataaccaccccattccacccagcctatgttactgccgagaggatcaagaacgcaaagaacctcgagctgcttctcacagctgggattggctcggaccatattgatttgccagctgctgctgctgcaagcatgacagtggctgaggttactggaagtaacactgtctctgtggcagaagatgagctcatgcgcatcttgattctgct

SEQ ID NO: 10855 - DNA, 459 bp, Triticum aestivum
  unsure at all n locations
  Clone ID: LIB31-024-Q1-E1-F5
ctcgcgggtccacacgtcacggaaaaatcgttctggagatcagcccaagcccagcagaagccactcctaaccatgttcgctcgattgacaagagcagggcggaagattggatcgagggcgcccgcatggcctcgccgccgctgtcacctggattcgctagccgcctccttgagtcacacccgtcgccgccgcgagtaagctccaccgttgctgccaggaatctcgtccccggcaaggtaatttcctctgaatccctgctctccctaactcccttatcctgctgccctacttgctgcgtgtgtgctgtgtgctgtgtgcgtttagccatgatctccgcgagaaagctcaagtcnctcgacttttacaggtaccatccgcctcccttccgatcttcagatctccatatgtggtgaatgtggtgttttggtttttcgtcggattactatctgtattcgggga

SEQ ID NO: 10856 - DNA, 460 bp, Triticum aestivum
  Clone ID: LIB31-024-Q1-E1-G1
cgggtccacgctgaaccaaacagcggcggcgatggcgagggcggatgtgtggaagaaggaccaggctcgccgaaacaggcacccggactacgagttcttcctgtcccggcagcaacggtagatgactcgaggcttttgcgcgaaccatgtttgagaacgctgacggatgcttgttcccctgtaaccagaaccaaccatgccggctgagcggcgccgtctgcctgtgttaccaccctgtatatatttgagatagaggcacatgtggaggtgctgctcaattgaaagtgaaaccagaccagagatgttggttactaagtggggttgatatcataggtgcaaccccttttaaatctaattagcttgctcacccatgtgatgtacatatatgcctgtaactcaactcagcccagccctgtatctaactgtttagctgcatattataatatagatctgattaaca

SEQ ID NO: 10857 - DNA, 354 bp, Triticum aestivum
  Clone ID: LIB31-024-Q1-E1-G4
cacatttcagtgtttatgcggtgtccgagaagcctactcaacccgccgcattaaagtcggcttcgcatccattcgcttgacgcgcaacttcgacgctgtgcaaatcacaccgccccactcctctcagctcacaacctcttcgatcctctccgctctggcggcgtccacacctcaccatgcagaaatcttggttctccgcaccggcaagcaatggctcctgatacggatcatagcgccgccgcatcgctctccgaagcctttgacccccacggtggccaatgagcagtcgccgtaccagcagttgtgtatcttctcagaggcggcagtcacggatgtggagtactggcagcacat

SEQ ID NO: 10858 - DNA, 427 bp, Triticum aestivum
  Clone ID: LIB31-024-Q1-E1-G7
gtattttttatatattccaaaaatattctccataaattttcaggtcaatccgagaactttgatttctccacaaagagcacaccatggcaattctgctgaaaacaacatctatccgcgttagttccattcaaatcatgcaaactagagtccaaaacaagagaaaaagtgtttggaaaagtagatacgatggagacatatcaactcccccaagcttaacacattgcttgtcctcaaacaattcagttgacaaactgaaagtgacaaagaaaaacttttacaaactctatttgatcttgttgttgcaaatatgtcgaaccaatgttcatgttttcagcaaggattatgaactaaccatattcacaataacacttaggtctcacatttactcatatcaatggcataactaactagcgagcaataataagat

SEQ ID NO: 10859 - DNA, 456 bp, Triticum aestivum
  unsure at all n locations
  Clone ID: LIB31-024-Q1-E1-G8
attcgccggtccacgaggccttcctcagctaagtatgatgtgaagccgaacaatgccattcttgccgaggacaagcacttgcccatgtacgatgagttgtccagcaaggacaatgttgagtatattgctggaggagccacgcagaactctatcagggttgcccaatggatgcttcaaactcctggtgcaacaagttacatgggttgcattggaaaggacaagtatggtgaggagatgaagagcgccgctaaagctgcaggagttactgctcattactatgaggatgaggctgctcctacaggcacatgtgctgtctgtgttgttggtggcgaaaggtcattgattgcaaacttatctgctgcgaactgctacanatctgagcatctaaagatgctagagaactgggcactagnttgagaaagcganatacatcctacattgctggctttttcctac

SEQ ID NO: 10860 - DNA, 452 bp, Triticum aestivum
  unsure at all n locations
  Clone ID: LIB31-024-Q1-E1-H2
cgggtccacgctttcttttcttgttgtaccggtgtggcatcgcctttggacaagccctttgtctcgattctccctttgcagctcagctccaccgaccagatgatgatggctgacaaagagctcgatgtccatggctcgccgggttccgctggctccactaacagctgtgtgcgggggcttgcacaggatacccagcaagtgtttaggattccacacagggcagttcttgacatgctcctagcacaccttggcctatcaccggctcagtatgaacatgttgttcatgaggacgacaagatccatgtgaccgtctttttcaacacctctacgttgggtcctggaggaccaatcagtatgaaagtgtcatgtcgtcattcctactggtctattttatgcctaagacatgcaaagttgtggatcgtcntgtaagctacatgtgctatcgtatctcc

SEQ ID NO: 10861 - DNA, 455 bp, Triticum aestivum
  Clone ID: LIB31-024-Q1-E1-H3
cggggcgacccagacttgattactctggttgaatctgatcctttccatggctatgaaactgaaactgttgtggcacatcttactaagttgaataacatagccaccctttttactcatgatgagaaaactcgctattactttattctcaaattatttccttcctcattaaagggtgatgctaaagcttggtacaatactcttgctcctagttgtgtgcgtagtccccaggatatgatttattacttctctgaaaaatatttccctactcataagaaacaagctgccttgcaggaaatatttaactttgtgcaaattaaagaagagagtctcccacaagcttgggggaggctttgccaattacttaatgccttgctagatcatcatcttaagaaaaatgaaatacttgatatcttctataatggactaaccgatgcttctagggaacttctagatag

SEQ ID NO: 10862 - DNA, 378 bp, Triticum aestivum
  Clone ID: LIB31-024-Q1-E1-H7
ggtccacaagacgacagaaaggggggtcctcggagggttcatgtacgcctaccagaactccgccggacgcctcatggggttcttccccaacgaatccgaggtcgcgcgctacaagtacaagctgtagtggtagaaggcatcatcatttctccccgtttctctaccgcaagtgttacttctttgcttttatctttctctaatctcgtgtgagcaatgtgtggtcttggtgtaataaatggggtgccttgctgcacagtagtgaggaattcatgccaaaaaaaagaaaagaaataataaaaaaaaagcggcggcccaaaaggttccagcctaacttatgctggaaggcaagttaaaacccctccaaaatggctacctaat

SEQ ID NO: 10863 - DNA, 310 bp, Triticum aestivum
  Clone ID: LIB31-025-Q1-E1-A2
actcacgggtcgacgaccgacactatacttcacacgatcggttgggttctcttgtgctttttgcctgctagggcaatagactagcaggaatggttgttttcatacgttgtgaggatatgagtagaacatggagagttctgcagtgtttctagacgtctttgtcccttcaaaagcggtcttttccttggcgacctctggcagatgcatgcgtggtagcggcattcggccaggttttggggacccatggtctccagtgtatttttttaatgacgatggtccatgacgttggaattttgagctacggtggccc

SEQ ID NO: 10864 - DNA, 267 bp, Triticum aestivum
  Clone ID: LIB31-025-Q1-E1-A3
ggtcgacgatcgactctaagggtacctgactcgcgatcgtggcttagggaaacgtaataataacactgtcacgttcatggtcatgactagtgttcctatcagtgttgtcaggaccatgggcatcgcagcgtatgtgactcacattatggagtatcgcttgtgtgtgttcgttaatagctggtgcatgttgaaccacggcacttgtgtgctatctaatcggacatgtaggttcatcgaagttgatggcagcatggctgagctcatcag

SEQ ID NO: 10865 - DNA, 399 bp, Triticum aestivum
  Clone ID: LIB31-025-Q1-E1-A7
ccgggccgaccgaaaaacgacagaaggggaacctaattagcttggacttgtacaagaacaacgtttcggggactatacctccaacacttgggaagttgaagtcccttgtgttcttgcggctcaacggcaatcgtttgactggaccaattccaagggagctggccggaatatccagcctcaaagttgttgatgtttctggtaataatctgtgtggaacaattcccacgactggaccatttgagcacattcctctcagcaacttcgagaggaacccacgcttggaaggaccagaactacaaggcctggctgtatatgaaaccaactgctaaacggccacgggaaggtggaaaatgcttacgaagtaacgggcgtacaaggtttaccggagatcggggtgat

SEQ ID NO: 10866 - DNA, 434 bp, Triticum aestivum
  Clone ID: LIB31-025-Q1-E1-A9
cggtctagaattcacgggtagacacatatgtacatgtgcatgtcgccaatgacttgtgggaagcgctcgaatctaagttcgaggccgccgattacaagatgtatattatagagcagttccatgattacaagatggttgagaaccgtcctgtactggagcaggctcatgagataatatgcattgttaaggagcttgagcttctgaagtgcgagttacggggcaagtttgtcgcgggctgcataatcgctaagttccccaattctcggaggaactttgccaccactctgaaacatcagaggcgtgaattcttcgtggaggatgtcattggccatctgagtgttgggcagaattcgagggcaaaggactcgcacggaaaatgggccgaaaggacttctgttgccaacatggggaagcacgggaacttcaactcccac

SEQ ID NO: 10867 - DNA, 346 bp, Triticum aestivum
  Clone ID: LIB31-025-Q1-E1-B10
ctcgcgggtaaacgctgcgcactaacgagagtcggaggagggggattgtcagcgacagagcacaggaagagcatcaaaggcccagcccaagacccaaacgcaagcctctacttccgtctcggcttgcaggcctagaatgggcccttggtcttgtaacgatataaacagagtgttccccttcgggagtaggcggcggcagatggctggtggctggcaaggatagcgtgtgcgtgtgtttctctctcctccctctcgatccccctttccccatgggtttgtagctcgaatttgtaatcatggagtaatggagaggtagccctgacagaaagactatgggattcaacac

SEQ ID NO: 10868 - DNA, 427 bp, Triticum aestivum
  Clone ID: LIB31-025-Q1-E1-B11
ctcgcgggtagacacgtctgactatggtgcgtcctatgaacattttgccatcgcacatgaggatgtgtacaagctggctgagacaattaaatcatcttcatgttgtaagatcactcgtgaacctggtcctgtcaagggagggtccactgtgattgcttttgcaccagacccagatggttacatgttcgagcttatccagaggggtccgacgcctgagcctctctgtcaagttatgcttcgtgttggtgaccttgatcggtctatcatgttctacgagaaggcccttgggatgaagcttctgaggaagaaggatgtgcctcagtacaagtacactattgccatgatgggctatgctgaggaggataagaccactgttctggagttgacatacaactatggtgtcacagaatataacaggggcaatgca

SEQ ID NO: 10869 - DNA, 419 bp, Triticum aestivum
  Clone ID: LIB31-025-Q1-E1-B12
ctcgcgggtagacgagaggtccgagatgcaccctcagaatccaatcacatgtgaacagattgctctcccttcagtgaccaccattgagcatgtgaagcccatatttgatgagcatggtgatgtctgcaagtacgagatgtcatggcacactgggacgcacagaggtcataatccgccatccatcttcgctcttgccgagctgaggggtagactctattggaaggcgtttgtatttcctgatacatcctcaggaagctacattgtggtgctcatccacaatccacaatgtcagctctcatttgcaaaggcagggggtgataagtggacctggctaccgcctgattatctctatgatgactgcacttataaagatggcatattgtatacagtgaatgttaaaggagaattccacgcattcg

SEQ ID NO: 10870 - DNA, 355 bp, Triticum aestivum
  Clone ID: LIB31-025-Q1-E1-B4
gagaagcgcaagaccatcaacggcgacgacctgatctggtccatgggcacgctcggcttcgaggactacgtctagcccctcaagctctatctcaagctctaccgggagatggagggtgacacgtcaaagggttcgaaatctgagcaggctgcaaagaaagtgggtgcactgaatgggcagcctggatcatcgttcaacggcatgtaaggtggaggatgatactgatcggcgtatgacaaacatacacatacaattcgttggcagtgtgatcctagcagtactgcgcctttgtggccggggaaagtccccagcactctgcttagttctgtgcatgcgggatacttgaaataccatg

SEQ ID NO: 10871 - DNA, 440 bp, Triticum aestivum
  Clone ID: LIB31-025-Q1-E1-B5
ctcgtgggtcgacgcaactccctaaattgagtacgtatgaactatatttagttgcgtaaacggaacattacttaaaaccttgcaaacaatgtttcaaatttagaacactttaattaagttaggaatattttttaacacacacgaacgaatttaaaaattccagtcatcttttgaagctatgaagaaattttcaacttcctgaacattttttcgtaaatgtgaacatttttggaatttgtaaacaaaactcgaaaagcggaacttagtttgaaattatatacaatttgtttaaaacaagaacatttttaaaattatcaatacatttttgaaaacgtgaacattttttaaaattccagaacatgatttgaaaacatgaacattttttgaattggtgaacaaattttgaaaacagggacaacatcctagattcataacaaaat

SEQ ID NO: 10872 - DNA, 302 bp, Triticum aestivum
  Clone ID: LIB31-025-Q1-E1-B6
aacgccctacattgagtcgtactagaatacgctgagctaataaagaggggatctaccgcagaggatttgggagccggccatgctgaagcagcacaagtgcaatgattaggtttatacaaggctcctcacaacgaggaagaaccaagctctcttagtcctgaccctcctggaacggagcctgagcaagttgagtttgcacctgcaacgaaacaggaagattctgaaggtgataggaggggaaaaatgcggggcgaagagaggaaaagggacaggagataagaggcggaggcgtggaaggcact

SEQ ID NO: 10873 - DNA, 439 bp, Triticum aestivum
  Clone ID: LIB31-025-Q1-E1-B8
caggtctagaactcacgggtcgacggttgacttgaaactggttcataaaatcaccccctagtggtgaattaatggcagacatgcaactgaggtaagacaactaattgggtcaagttgcgggttgacgatggacttgcaactaatgcaaaaaaagagtcgggacctattgcgatgacaaatcaaacatcaagtcaagttaggaatcgagggtcaacttgcagctaaagaaaaaaaagagttggacctagttacaagttaatagtggacttggaggaaaaaagggtcgatcataattgcaagttgagggtaaaattgtaactaaagcaaatagaaagaagcacaaaaaaggttaaacaaaacatcgactctaatgaaaaataagacgaaaatgaaaagaggagaatggggagaggcaaagcagccaaagaatggaagtgat

SEQ ID NO: 10874 - DNA, 322 bp, Triticum aestivum
  Clone ID: LIB31-025-Q1-E1-B9
cgatgacgtaccaatctacatcgaaagacgggacacctccgcctctatcaagtggtatcagatttccaggttgctcggtgagattttacagtttttcgtagtttagatcgagtctgttcttcatacctacagtccacgaagaaagccacaaaaaaaattagggttagttcatcatatccgaaccaatctgagcctttgcataatctttttagggttttgctttgttgaatttgcggttgcatcgtcgtgtctagttgcaggtcttagagtctagtcttttagagtttcgagttctggtcataagttgtcacgccggggccgc

SEQ ID NO: 10875 - DNA, 385 bp, Triticum aestivum
  unsure at all n locations
  Clone ID: LIB31-025-Q1-E1-C1
ggtctaggactcacgggtcgacgatggacgtgaagcttggtcatgctcgccatgcggtttggtgctcgtgcgcatgcagtccggcaagtgctatctgttcccctgcagtccgtcaaccatgccatgcaactcagagacacttcccatgcggttcagagctcgtgcgtgtgtaatctagccagtgtctgtgcatgtacagtccagcgagcatccgtgcacagcagcgcctctgccacaacattcagtagaggattcccctagtttggaaaatgctaacttttggattctaagacgaattaggtcncttaattatgatgatatgttgctagaccaattagtgtccatgcacaacagcttctaagaccaattttgaattaacttttgg

SEQ ID NO: 10876 - DNA, 421 bp, Triticum aestivum
  Clone ID: LIB31-025-Q1-E1-C11
ctcgcgggtagacagagaaccccaagcttctgatcaattacattttagtactcacactttttgctgatgacttcagatctgaacctacggatatatgtgcggacttgaaaatgaaccgccagatgcttaaaccatattatgaccagctgggatgcaagtccgtgtcaacaggtgcttttaaaccagtttttatgacacttccagcacccctcaagttcccacaacaagtcacaaggagaaggcggcgaaaataaccatcttagttattggtttccatttgatatggttgtgataggaaaggtatgcattgccaccgtcgaacctatgtgccctcagctcagtttcaccaatgtagtggagaaaatgatgaaggtggttgttctgtctttgttttctattgtcacttgggaattgctacgag

SEQ ID NO: 10877 - DNA, 359 bp, Triticum aestivum
  Clone ID: LIB31-025-Q1-E1-C2
gggtcgacgcctcacacaagcgtgaaacgatcttgggcagcgctggggaccggcaagtcacgagttcttacctcgaaggcgtcattctgggaaatcaagataaggataacttcctcgtgccttactttcccgagtaggtcatcccctcaaccgccccgtaacatatgaagtcttagaatgcgatcgtttgtcttttaacattccgtgttttctggagtgaaacacgttgcacgctcatcctcctaagccgagatattccatggccacagatttcaacacggatcgtgagtccaacttagacgacacagatgtcaagaaagttcttgacgatgttcgccacggctaagtcgaatctggag

SEQ ID NO: 10878 - DNA, 420 bp, Triticum aestivum
  Clone ID: LIB31-025-Q1-E1-C3
aatttacgggtcgacgtccacataataccactagaggaaagacaacatacatctcatcaaaatatcaaacgaatcccaaattcacatgactactaatagcaagacttctcccatgtcctcaggaacaaacgtaactactcacaaagcatattcatgttcataatcagaggggtattaatatgcatataagatctgaacatatgatcttccaccaaataaaccggcaagcatcaactacaaggagtaatcaacactactagcaacctataggtaccaatcctagacttagagacaaaaattggatacaggagatgaactagggtttgagaggagatagtgctggtgaagatgttgatggagattggccccctcctgatgagaggagcgttggtgatgacgactgggatgatttccccctcc

SEQ ID NO: 10879 - DNA, 396 bp, Triticum aestivum
  Clone ID: LIB31-025-Q1-E1-D1
ggtatgtacaccggccagttcgtctactgcggacgccgagccaccctctccgtcggcaacgtcctcccgctccgctccgtccctgagggaggcgtcatctgcaacgtcgagcaccacgtcggcgaccgtggtgtcttcgccagggcctccggtgactacgccatcgtcatcagccacaaccccgacaacggcacctcaaggatcaagctcccctctggtgccaagaagattgtcccaagcagctgccgtgccatgattggtcaggttgctggtggtggcaggactgagaagccaatgctcaaggctggtaacgcctaccacaagtaccgtgtgaagaggaactcctggcctaaggtgcgtggtgtggccatgaaccctgtggagcatccccacgga

SEQ ID NO: 10880 - DNA, 414 bp, Triticum aestivum
  Clone ID: LIB31-025-Q1-E1-D10
ctcacgggtagacagaaagcccaataagctctacgatctgggacacggagggaaacatttaatcatctcgcgagctggttaagggatgtgaggcaatttgcaaagggcaacatgacaataatgctagttggaaacaaatgtgatctatctcacaggcatgccgtgagctatgaggaaggtaggaagttcgcaaatgagcatggtctgatctttgtggaggcatatgcaaaagctgcacaaaatgttgaggaggtgacagactgatcgatccttgttgcatctctgtgaaattaacgcctctctaggcattttctcatgccatttcaaatgcagggttttgttcagactgctggagtcatctctactcccaatgtctgagttgattgaattgtacggtttaatttcgtgcaaaaa

SEQ ID NO: 10881 - DNA, 410 bp, Triticum aestivum
  Clone ID: LIB31-025-Q1-E1-D12
ctcgtgggtaaacgcgcatggctaaaggtagtcctatgactgcggcttgaaccttggccacatataccatgtgatgattgttgctactaatgatgtatccacatcgtaatcctgagccagcatgtgtctcgggaaaactagtttatgaactgtgggaattcgtggatgcatttctagtcatagtaaacagtccttgctggcacgacgttgttctggtcaggtcagatcctctgcctttcctttgcctgctttgctggtccgacagaattgaccgtcccgagtatgtgcatgttgttctttagtcggtttgttccggtattgcctggaaacaggaagatctcatgtgttaataatcatcccctgtctatgatctgtccatgcgcgtcaagattccgaaataacgatcccgc

SEQ ID NO: 10882 - DNA, 123 bp, Triticum aestivum
  Clone ID: LIB31-025-Q1-E1-D3
gggtcgacgtaccacgggagccttaattccatttcgtgggtgacatctgtcgcgacaggtgctgcgccacgtgtttcctctagggaatggtgatttcccacgtgggaccaccccagttgtctg

SEQ ID NO: 10883 - DNA, 435 bp, Triticum aestivum
  Clone ID: LIB31-025-Q1-E1-D4
gggtcgacctcgccgtcaactgcgaatactgatcagatcgagccagcctagatcaagacttgaaccacaaagcaacctagacgataccagagagagagagagagagagagatggtaagtgtagtgcagtgcacagaccgttatcgtcagcgtcctggatcatcaacctgacctcgtcgagcgtaaagtgctcgccggcctcgatggccagccgctggatgtccatgtccggcctcgatggcctcatctgcccgaaagatgacatggtgagtaacccccaatctgggacacctcagacgatgacagaagagagaggaggagtcatgagactgtgatagcctggttttttgccttcgctcgttttttcggactttcttttgcatcgactttggattttgagttttgagtcaagtcaaatggacttgaacacttgggc

SEQ ID NO: 10884 - DNA, 444 bp, Triticum aestivum
  Clone ID: LIB31-025-Q1-E1-D6
ggtctagaactcccggttcgacatatttttcaatcccactaccgttaatacaccaagttcatcaaagcactcacatctacacagaagtaggtttacacaactgatggttcattagcaatctcaaaaacaatcaacaactaatggttcacgttaaacaactgatttcacgcgaacataagcaatagcaattgattagcactcccactataaataaatataaatctctgtaattagtttattgaagcaaagttaatgagagaaaaagttatcactcaaatgtgttatctccaccctttgtcgaaagtttgatagaatctgagtccagtcgtcgcaattaggcttgactaaccccctacagttttctggccaaaaaatggttaagcaagcttttgggcctggtttatgaccggctaagttgggtttggtagtatggtcgaccatgat

SEQ ID NO: 10885 - DNA, 434 bp, Triticum aestivum
  Clone ID: LIB31-025-Q1-E1-D8
ctcgtgggccgacactgcacgctaaagtgaatcatattaaccagcactagagtctaatcgtagcaactcagccgctcacctgcagcaaatggaatcaggtgaaaacaacatgggctcgaatgatggaccaaacagcaaagctaacttggctgcgaggcaacgcttacggtggacagatgagttgcatgaacaatttgtggaggctgttactcaacttggcggtcctgatagagcaactcctaaaggagttttgagaattatgggtacaccaggattaacaatataccatgtgaaaagtcacctacagaaatacaggctagcaaagtacattcccgactcttcagctgatggtaacaaggctgataacaaagatccaggggattcactagcaggacttgatggatcctctggaatgcagatatctgaagccctga

SEQ ID NO: 10886 - DNA, 396 bp, Triticum aestivum
  Clone ID: LIB31-025-Q1-E1-D9
cacaaaggcccattataactaacacatgtactccatgaaaagcctatggacaaaaccttcaaatataactcgaggcaaccattagaccatagagattgtcatcaattaccaaaaccaaacatgggggcaccgcatgttctttcggtgtgtcatcatcatccgtcggtgcgtcattattatattatgacgagagtcctgcatggactcaacaattatagtgattatgagaacatcatgtgtgatgttcacgacatttggcctttcacaaccatgcacatttatcccttcaccatgtttactccagcattcatatcccaacacgaatctcctcgtgaccaaatgtgtctggatctctgtagtgcttttcatactttgcaaatcttgacactccaaaca

SEQ ID NO: 10887 - DNA, 163 bp, Triticum aestivum
  Clone ID: LIB31-025-Q1-E1-E1
aattcagggtcgacgccactatcaaactgcaaaacggaatccttagaagtgtgtcgatcatcattcatgttcacatgtgactccatttcaagaaatatccagtggccgcattatgccagaacgcactatcatcattctacatagcgaagtgggtatccgtcgc

SEQ ID NO: 10888 - DNA, 352 bp, Triticum aestivum
  Clone ID: LIB31-025-Q1-E1-E10
gggtagacttcgttgtccataacaatgcacacattgttttcacaactaattgcaacgcattcgtagcaaatatattagagtgtgacgcgcccaccttcttgttttgtacacggaccactatggttgtttgatatgtgtttcacgtgcgctagattcgcattcaattttgatcttcttgttgattatgattgtgttgtttccttttgttgatatggtcttacttggtgcaagggatattggtgctcagggtggagcgagctattggttggtcactatgatattgttacgcaccacagtgttagcgtacatcggtgtttcacgttagcctcgtacggatgccacgattatctac

SEQ ID NO: 10889 - DNA, 413 bp, Triticum aestivum
  Clone ID: LIB31-025-Q1-E1-E12
gggtagacacggcgttcgagatcattgctaactatggagatgccgaagttgcgacaccaaggaaatcatcgagatcatcgccggggagagcaaggtgaggacggcaaatttgcaagccatcgtcaaggtgtgcatatgagttcttgtaaggtgcgttcaagaattcggtggtgtgagtcgtctgctgcacttgagatgcgtcactgacggaagagaattgagagtggagagcggatggaaaaggaaattgtgccttgcatttccgttcgtgatcaagaagttccaacgagttcatcatatggtaaaggtgagttgcacgtatatggcgagttgtgttgctcctagacaggaggtgtcgttcgataagatatgggatcgacggcaacaagaaaatgtgaagatgttggcgggtg

SEQ ID NO: 10890 - DNA, 270 bp, Triticum aestivum
  Clone ID: LIB31-025-Q1-E1-E5
ctcacgggtcgacgttcatctctaaaatgtctctctgatacaccaatgtagggaaacattggtgtaactgctgctgttttgttctctctgttccggtttcatgatcatatcggtcatgatgggtaaaatagggacagttcatgtaaacggatgggcactggacatggatctgtttatttaggtcaccctatcactttgtaagaaaactcattattgcgaaagtattactgaaagtgcatctgtgcgtctagcagttgcatcgtcctgtcc

SEQ ID NO: 10891 - DNA, 411 bp, Triticum aestivum
  Clone ID: LIB31-025-Q1-E1-E9
gggtagaccgccgacgaccagcatgggtcgtaagctctccggaatggcccagccagtcgtcgaatcctcctatgtcccaacggggtcgggcggggtaatctgtgtcggcactaggatgaaaggggcgcgtgcttcctggcacggcaggggaaacaactgcttcaccatgtctgaacctccctgcgtcgccattgccgcctccctctctcgctgtcggtgtcgctgcaacttccggcgacgttctccgccttgcaagacagaaccggcgaagtgacgccgacggacgaggtggatctcgtctccgtcgcggcggtcggggacaagctagacgacatctcgggcagtggaccaggaccggtggcgaggatggggaacaacggtgaaggatggccaatgctcggccacgggaaa

SEQ ID NO: 10892 - DNA, 348 bp, Triticum aestivum
  Clone ID: LIB31-025-Q1-E1-F12
actcgcgggtagacaggagacgctacatagcgtctgagcatctgccctccccgtcgaggtcgctcctcaccatcgcaggcacggtctggtcggggccacgacgacgagaggagcagcagaggataacttttccccacggatccttctcgtcttccacgtgattcgagtctcctctctccatcaggttttgaaggcggttttgtgtagaacagccacggagcagaaacaacgaacatgctgcttcagcaacagcgtaatgatcctgatgatactcttatcattttgttaacgtaatgtgtgttctgtcaatgctcgctccggatgctagctagacctactgggtagcat

SEQ ID NO: 10893 - DNA, 366 bp, Triticum aestivum
  Clone ID: LIB31-025-Q1-E1-F2
gtctagaactcgcgggtcgacgccatggtctacacggtgtccgccaatcacgcctccaaggacgagtaggctctggtctgatctgatctgatcggcggccctcctggtgtcgatcttggtttcggtgtgtgtatcgctagaaagaaactttaatacgtagtagtcggctaggctccatcgtcgttgtggtatcagcagcgaagatgcgaagtcgcaatagaatgcttgctgtataacttatgcatttgctaaatttgctacgccatgcatgtctgccacacgctatttggatgtggctaaagaactcctgaataattctgtacataatttgtaatgcttccatcagaatggtgttccgtcgcaaaa

SEQ ID NO: 10894 - DNA, 346 bp, Triticum aestivum
  Clone ID: LIB31-025-Q1-E1-F4
gggtcgacgactcaatcccacacgcacgttaagtacaagacatatcgcctcatgcactccaagcaagttcagggagggcgaatgagttgagctccaatattagaacatcgaagggtagtagaacgcctctgccaacaaggtaagcttgagcaatggaacgtggtctgactgtagccagtacaggcgtcgttgctgcttccttcaccagtgagagaagaggataagggtcaaactggagatccgtcagtgcccaccaaaaatcgagatctgcgccgagtttcacatccagctcaattacctagcatgggtcgtggttcctcaacaaaacatcaggcaacagagatat

SEQ ID NO: 10895 - DNA, 422 bp, Triticum aestivum
  Clone ID: LIB31-025-Q1-E1-F8
actcgcgggccgacaccgaacacaacggtaagtcatagaaaacgtcgaagagcacaacgagcccgttcaagaacaatcacacggaggatggcggatccgtgttcttcggagaggacacgaacaacgggagccagcagttggaggggacggagaccgagaccgaggactacaccaagttcacggtgctgaagctgaagcaggagctgaccaagcaggggttcggcgcccagctgctgcagctgaagaaccccaacaagaaggacatcgtcgccttgtatgagaagcacgtcgttggcggcgcttgactgcctcttcctcaacaatatgtaacgcatcattttaactcgtgtgctaattctagatttcgtgcagcgttgtgtgctggtgacacgttttaggtcagattgtgaaacagcatatgt

SEQ ID NO: 10896 - DNA, 358 bp, Triticum aestivum
  Clone ID: LIB31-025-Q1-E1-F9
ctcgcgggtagacggtggtcacaagctcaagacgaagcactgctaccactccttccatcagcgatgcatcttcgactggcttcgccttaaccgcatctgccctgtctgccgcttcgcgctggccccacagtcagacgacgacagcaacaaggatctgggactgcctgagaaagtcgaatagctcgacagtttgccggaagttgaattgaagtgtgcagcccttgcaagccacgactgtgctagcaggttgtattcatcttcttttctgttatgttctgttttttattggattatcgatcaaaagcttgtagtttgaaccaaaattacttttttcaacttgaaaacgggctcttagttg

SEQ ID NO: 10897 - DNA, 409 bp, Triticum aestivum
  Clone ID: LIB31-025-Q1-E1-G10
gggtagacatatcacacgcgcctaactgacacaatgacgagctgacacgtgtttcgtccggccaataagaattttacacgtggaaatttcccattggtcggggccgttaacgggttatcggatccaaaacccgacctgatagcttaacagcgttccgttacggtggatgccacgtgtcggtcacccttgacgaaagcacttctgtgacgcacgatttatcgtcatggaagtggacacttccgtgatgataattttggtaatgtcatggaacacttctacgacagcacaggtatgactatcttgattctatcataaaatcgtcatggatgtacatgcatgacaaaaaacgcgacctactgtgacaaacacgtatcatcacggaagtgcattttttgtagtgtcatcatta

SEQ ID NO: 10898 - DNA, 251 bp, Triticum aestivum
  Clone ID: LIB31-025-Q1-E1-G12
gagactaatcatcgcacatgttccatttgctctgttcgtgtgcagcgggtaactctactcatgtattggtgctcttgggcctgaggaccgggcagtgcgcgcaggagcctaccgcttaattgtgggtctgtgggatgtggctgtaattgtggtcgtacgccatgaccggagtagctagtagtgtgcgctgcactgactggatgcaggcagcgatgcgacgcatagccggagggaggttaggggtccaccga

SEQ ID NO: 10899 - DNA, 364 bp, Triticum aestivum
  Clone ID: LIB31-025-Q1-E1-G2
gggtcgacaggccacccaatagtcagtcgaaagcaccgtatgagattctgcaggctgcagcatttgtcatcgcaaacgccacaagagaacaacctaccctgacagggaatgcaagagcaccatcggtggtgctcaaagtcagatgtgagagttaatttttctaaatcagaaacttgtactctgaagattttctagtgtgtttcagtgatcaatgcgcccttgtgttcctccagttcaggacgtcagacttactataccattcagtagactttgttgtcgttcatcactattttcttgggttcctcttgggccgtcagtgtttgtaagcgatgctattcatgtacgaagtacttgcgaacttttg

SEQ ID NO: 10900 - DNA, 407 bp, Triticum aestivum
  Clone ID: LIB31-025-Q1-E1-G3
ctcacgggtcgactgctcctcctgcatactatgctcataaacctgcgttccgtgcgcgattctacctaggccaagtcccagacatggcgtcggagataagcgccggcagtgcacctcctccattgatgcttcctgagataaaagatgggctgaagagccacatgttctactgctagtccacacacaaatgaacgaagcctgaagcctggagaactctaaagattttatttcaagtatacatggcaacctgaagattttattttgtttctgttggtttgatgaacattggactatctctagtctctttaatatttccagagaatgattggtttatggctttatgcaagggtatgaatggaaagtttacaaaagaaaaaaaagaaggaaaaaaaaaaaaagcgggcgct

SEQ ID NO: 10901 - DNA, 415 bp, Triticum aestivum
  Clone ID: LIB31-025-Q1-E1-H10
aacatctatgcctaaatcaactgtggtaattttcgttgtatgcatacaagtatcatgcacagccatattgatgctctcgctattgttgtcctcatttgtaggcatagtctataatggaactcgtaaaggtgctagtcaggaggtggcccacagtgcttaggctaccaagtatcgttactgatgtatctgtgcctggctaatcatgtgcaatgtgtggcctgctctgttctgtgaaatgagctgtgtgacccttgatgtaatgtctgtcaactttgaaagtgtcgcgtaactatgtatttgtatcttaaatacatgtcataaacctgtaaccctttgaaacaggacctgctgtctattggtattactgattaaagtgatatttggttcgaaaaaaaaaagggggggagaataaaaa

SEQ ID NO: 10902 - DNA, 397 bp, Triticum aestivum
  Clone ID: LIB31-025-Q1-E1-H12
cctcacaggcctgaaaccatactgatttttggtcacgcttgtcattcttcttaagcgatgctcaatgactctctcccatagcttcattgtatggctcatcagcttaattccacggtaattagtacaactctgaacatcccccttgttcttgaagattggtacgaatatactccgtctccattcttctggcatcttgtttgcccgaaaaatgaggttgaaaagcttggttagccatactatcgctatgtccccgagacctttccacacctcaatggggatacaatcagggcccatcgccttgcctcctttcatcctttttaaagcctcaaacaaataaatgttgtgaacatgtaatttgccctgtccacatgtaatcctctccattcataaataattg

SEQ ID NO: 10903 - DNA, 433 bp, Triticum aestivum
  Clone ID: LIB31-025-Q1-E1-H4
cgggtcgacaacagcgggacgatcgttgggatcaaatgcaaagatggaattgtccttggtgtggagaagctgataacatcaaagatgatacttgctgggtcgaaccggagacttcattccgtgcaccggaactctggcttggctgtggctgggttagcagcagacggtatgcagatagtctcaagagcaaagtcagaagcagccaactatgaaaaggtatacggagaacccatgcctgtaaaggaattagctgatcgtgttgctagctatgttcatctgtgtacactctactggtggctcaggccttttggctgtggagttattcttggaggctatgatacggatgggccacagctctacatgatcgaaccttcaggcctctcctataaatattttggtgctgctctgggtaaaggaagacaagctgcaaaaa

SEQ ID NO: 10904 - DNA, 427 bp, Triticum aestivum
  Clone ID: LIB31-025-Q1-E1-H5
caggtctagaactcgcgggtcgacgctccacttgatcctgaggcttaggggtggaactatgatcaaggtgaagacacttactgggaaggaaattgagattgatattgagcccactgacacaatcgacagaatcaaggaacgtgttgaggagaaagagggtattccacctgttcaacagaggctcatctatgctgggaagcaactcgctgatgacaaaactgctaaggactacaacatcgaaggtggttcagtgctccatcttgtgcttgctctgaggggcggtcagtagatgcaacctcgacgtggaccgtaaaggccatttctaccagaacttgtttgcagacctagatctgtgaatttgccggttgattgaagtgccatgtaattgacgcatttgtgaagtcagctgtcacctgtacttggatgg

SEQ ID NO: 10905 - DNA, 350 bp, Triticum aestivum
  Clone ID: LIB31-026-Q1-E1-A11
tgactcatcggagctcgacgacaatctcgggagcatcgcgcggtcagggagggcggagttcaaggacggactcacagcaggcgcctatgtgtcgattagtagacagtgtggtgtcggtttcaagtcttcctaaatcgtctggtaaaaggttgtctgtgcctagtcacgcaactattagcatgtgtatgtgtgggagtcccaggctggtgtctctgtcagtgagtcacgtgatatgtctggggagcttcactataggggtaataagacagtccactaccacaacgacgactaaatggaatatcttgaggaccgcagtagctgggatttagtgtgtagtcgttcagagttta

SEQ ID NO: 10906 - DNA, 440 bp, Triticum aestivum
  unsure at all n locations
  Clone ID: LIB31-026-Q1-E1-A2
cggtgcgatattcncgggacgccgtcgcagcacggaatggtcgtggcaacggcttgagaaaccgccattcaagagttataacgtcacgtcctacgctgtgcatccccagagatgtaccatcttcgtcagcaccaagatgaacgacattgaggccaccttttcctttgacatggaaaagcaaaagtgggaacaacttggcagttgggcgctgcccttcgcaggccgtggtcactttgatccgtacctcaatgcctttgttgggctctccaaagattctgacacccttgggcaagtctactcctgctgcttgtccagctccagcactggccacggccttgagtggaagctcggcaaggagaggctgttcagtcaggacccagctgagaggcatgtatgcgccaccctagtctacgtgggccagagcaaattctgcttagtgc

SEQ ID NO: 10907 - DNA, 291 bp, Triticum aestivum
  Clone ID: LIB31-026-Q1-E1-A3
agggctatgaaaagcaatgtgtaatatatttgcagctcacctgatatgggtaactgtcttataaaacgatctagctgtatagagtgtcatcatcagatgttgccaaggttgctccaacggaagtactcgtcttgcctcagttttctgtgaaatttccattggattacctacagccgtatgaataccgtcatgtacttctcactcaacttcactgggagcactgccaccgatgtgatatagatggtgctgatcacttacaagatggatgccagcagcaagatttgcactacc

SEQ ID NO: 10908 - DNA, 260 bp, Triticum aestivum
  Clone ID: LIB31-026-Q1-E1-B11
ctcgcgagtccacacgaggcgctaaaatgactcataggagttctacgatattgtcgctggcataaagctgctacatttatcagcgtattattctggagaagaatcagttgcacttttccccacccgtgcacggtatgatgatgaccgtcacctaacatgaaccgtgggttagcatgattggcaaatgacagactcacgtctgaatgtgaggttggcatgcagatctacagttgttggtggagctgttctgaactatgcac

SEQ ID NO: 10909 - DNA, 419 bp, Triticum aestivum
  Clone ID: LIB31-026-Q1-E1-B12
ctcgcgagtccacggcgatcacatcaggcactcctaggaggattaccatcggagtgcccatggtgtgagcttgggctatgccagcacggattttggctggaaggcgagatcctggagccggacgctgtcttcagaggattggcacgactgctttgaagtagacacggatgatatccccatgacagatgaagtatgttctgctttgttccctggtccacgggacgatgagaaggtggaggagccatcgttgagcgagctgatctgctacgctcccaccctgagtattgaggatgatgttctctacatgatgtccaagctgacccttgatccaaggaaccctgtggcatggttagctgctgttgacatggaaaagaaaacactggaacttatctctgttaatgatgaaattgcatcccgta

SEQ ID NO: 10910 - DNA, 448 bp, Triticum aestivum
  Clone ID: LIB31-026-Q1-E1-B2
cctgcccgtacggtgccgatattccgggacgacgaccactggccacctgatctataagcttggcggcattgacaagcgtgtgatcgagacgttccagaacgaacccgctgaaatgaacaagaggtctttcaggtacccctgggtgcgtgacaagctcaacgccgaccgtgacacgggtatcaccatcgacattgccctctggaagttccagaccaccaagtactactgcaccgtcattgatgcccctggtcaccgttacttcatcaagaacatgatcaccggtacctcccaggttgactgtgctgttctcatcatcgactccaccactggtggttttgaagctggtatctccaaggatggccacacacgtgatcacgctctccttgcttcgactcttggtgtgaagcatattatctgctgctgcaacaatatggacgtcaccactccc

SEQ ID NO: 10911 - DNA, 372 bp, Triticum aestivum
  Clone ID: LIB31-026-Q1-E1-B7
ctgatccaacaattgaaggctagatttcaccagaggcacactaatatccaagtcaaccttcacatactcgatggcacacgactttagttgttagatccaactaatgaatgacagaacgacgcttttgccagaacggggcttttgcccaaccaacataggaaaattgacgtgtgattgtatggcaaagccacgatgatcgaagaagctctctaacgcttgtaccagattcgacagcattagtcgtgcactgcacgctagcattacaccgctacagagcgtcaaaactcctatggggcaacccgccacctgcatgtgtgaactaatcctaaatgggaccctccacaaatcatttgatgggtccatagaatgtgg

SEQ ID NO: 10912 - DNA, 444 bp, Triticum aestivum
  Clone ID: LIB31-026-Q1-E1-C1
gggacgacacgacagaacgggggaagcgatcgatggtacctacattgacaagaagtgcccattcactggaactgttgccatcaggggcagaatcatagctggaacccgccacagtgccaagatgaacaggaccatcattgttcgcaggaactaccttcattttgtgaagaagtatcagaggtatgagaagaggcactccaacatcccagctcacatctccccctgcttccgagtcaaggaaggcgaccatgtcatcattggccagtgcagacccctgtcgaaaaccgtgagattcaatgtcctgaaggttgttccagctggaaccaccggaggcgggaagaaggctttcatcgctgcttaagcccaggctctgattcatgagtagttcatagtcagacgttttaagcacttaaacctaccaagctgctgctgttttgcgatttg

SEQ ID NO: 10913 - DNA, 426 bp, Triticum aestivum
  Clone ID: LIB31-026-Q1-E1-C12
tccacatggttccccacattgagtcatcatagaagcaaatcgctcgcgagatttctgttgtaacaacaagaagagtattcgaaaggattgcggttcgtcgtgtttcacaaagaacagcatggaagcttctcaaagatgctgcaaaatcgtcaaagaggaaagctatgagggggatgtcaattccagaatacacatactgtgttgccagaacaactttccgaggtaagatttacctgcagtatcacttttccttttgtaaattattattcaattatttttctttgttcaaacagcgcatgcattgggagtagctgctacttgggttgtacaatctgtcgtccaggtgtacaaatgttttattcgtcaacctgataatgatgacgatttgttcgacgagaaggaaaaactcaaaatgtttgcgagaag

SEQ ID NO: 10914 - DNA, 455 bp, Triticum aestivum
  Clone ID: LIB31-026-Q1-E1-C3
cgggacgacgccgctttctatatttagtcttattatttttttttgcaaattttatacttatttggtcaccttttaaggtaaaccggcatctcttgatccagccaggctatatgtcttcatctcaacctggtgtttcttaacccagtgtggcatacagttatcatctgttaaagcatataatcaatggtgaactggcatctttcaatccggtctggctttgactacctgtcgctagtatgatcatccggtgttcatcacaacccgggtttacttcttacataccagcattgcatggtggaagttgggtattcacccttactacaaataagttggtaaaccgacagcataatttcatatcacacgtattatttattttttgctatttttacaaccttggttacctaccaagttgtgtaatgggcattatgacccatccggtggtaaaccgcccggac

SEQ ID NO: 10915 - DNA, 405 bp, Triticum aestivum
  Clone ID: LIB31-026-Q1-E1-C4
agctgaaggagaggctggccaaagtgtacgaggtgaaggaccccaactgcatcttcgtgttcaagttccgcacccacttcggaggcggcaagtcctccggattcggtctcatctacgacaacctcgaatctgccaagaagttcgagcccaagtaccgccgcatcaggaacggccttgctaccaaggtagagaagtcacgcaagcagatcaaggaaaggaagaacaggacaaataagatccgtggtgtgaagaagaccaaggccggagatgccaagaagaaataagaacatttctgtcttcatctattcactatcagcctttgcttggtttaggacggtatccctgtggcaatgttgctgagtgcttaattatgactagaaaagactttgccatttgtgtcaatct

SEQ ID NO: 10916 - DNA, 338 bp, Triticum aestivum
  Clone ID: LIB31-026-Q1-E1-C5
gtggtcacagttgacaaccctcagaagaaagagaaccttcagaatgaatctgttgtggtgacccctgcaaaaccagctggtggcaagcctgctcctatcgaaccaattgtggttaaccggaaggcgaagctgtcatctgaagtgatgaaaatgattgactcagcaatagctggtcttgagaatggatatacaccagttatgtcagcagaaggttcagggggtgtttacttcatgcaagactcatcaggccagaagaatgttgcagtgtttaagccgattgatgaggaacctatggctgaaaacaacccaaggggtcatccactgtcgactgatgggga

SEQ ID NO: 10917 - DNA, 347 bp, Triticum aestivum
  Clone ID: LIB31-026-Q1-E1-D11
tcgcgagtcgacacaaggctctagagtgagtcatactagccgagaagggcgaagatctgaattgcaggatacatgcttcggtcactttccttagatgtgaggtcgtatatcttcaccaggagtgtacttttcgaggacgtaccgcacgttagaaggctgatgcccacacagacgatgtaccgtcagatcaggctctctggcaagatccactggtagagatttcagctcccatgtggaaagcctgggtgccattcctcagaaggaggcatcctccatccccatgtcgagaaataggttgactcatccccatggtcatccacggacaatgctgtggtccatcgctcagt

SEQ ID NO: 10918 - DNA, 398 bp, Triticum aestivum
  Clone ID: LIB31-026-Q1-E1-D3
ctcgcgggtacgacatcattcactatagtgaatcggtatatctgtgagctggctgcgagtgtgggctccgggaaggagagctccgcgccggaattggagctgtctgcggggaaactcaatccgcacgcaccatggttggcaatgaggattcgtattggatcagcgagtccatttagatgcagcgtggtcaagttagccggactgtgggcgcccgcaataataaaagagattgggagaccatgcagacctgctcactgcaagaaccacggtgtacagggtcactcgagattttttttgtacaagccgggtgaaatgagactgggttcaggggcttgaatcggagttcctgccaaatggttagacagttgggttcgaattcgctccagttgtgcatcaca

SEQ ID NO: 10919 - DNA, 397 bp, Triticum aestivum
  Clone ID: LIB31-026-Q1-E1-D4
tagcagcgacattacgacacatcgtcgtgctcaccaagatatgcacgttctgctgcgtcagacagccgccgctgtcgtcacaagggtacctaatacaccaccatcattcccaggaaaattctataggaccaacatacatgcttcagctgctcagatcaactcctcccattcgcctgcgtccctcctctcaatccaggacgcggatctccgacaagaattctttcgcatccaatcggagtttgcggaaatcatccatcaagatgtccttcatacctcggggaagttctacctcaacaacctaccgtccaacagtgacatcgacacaatgctacaaatgcatgctgacaacaaccgttatttcatgactcccacgatagactgcagcttcatccacgct

SEQ ID NO: 10920 - DNA, 368 bp, Triticum aestivum
  Clone ID: LIB31-026-Q1-E1-D9
tcggaggttgaagattttgccaagttgtcatttgagaaaaacgaataaaggaaagaaaaacctgtttatatctcaattgatgatggtaaatcaaatgctaccgtggaacgcttacagcacggctattgtgtcattcctagcgacaagaagtttttggttctgtatgctttcctaaaaaagaaacagtctaataaggtcctggtgttcttttcatcatgtagctcactaaagttccatgccgagcttctaaattttctccagatagggtgcgaacatatccatgggagacaaaaacagcacaaacgaactacaacattctttaacttctgcaacgcacaaaaaggcatcttattatgcacctaatgtgg

SEQ ID NO: 10921 - DNA, 404 bp, Triticum aestivum
  Clone ID: LIB31-026-Q1-E1-E12
ctcgcgagtccacactcgacgctaaagtgagtcgtactaaattctttcgcatccagtcagagtttgcggaaatcatccagcaagatgtccttcgtacctcggggcaatgctagctcagaaatcaggcgtccaatagtgacatcgactcaatgcgacaatatgcaggctgataacgcccgttctttcatgactcccacgatgagaggtggcttcatccaagctccggtcgcttgagtcaagtcgaaagcagtgatactgtgtccagttctgaaacatcgattgggtcatgttgtaattaaactttaatgaacttgtagtatgtctctttggtttcgagagtcgttcaatttagatgtaatcgatgcgaatactgtcttgcatttctcttccgatcgtccgatgca

SEQ ID NO: 10922 - DNA, 431 bp, Triticum aestivum
  Clone ID: LIB31-026-Q1-E1-E2
cggtgatgatcctccacgctcccgaggagaggtccccggactcggtggagcagatttggcgcctggcaacgcagcctaccttcctttgctatgctgctctagcagtggctgtttcattgcttcttatgctatattgtgctccacggtatgggcagacgaacataatgatctatgttggtatttgctctgttatcggatccctcacggtaatgagcatcaaggccgtgggcattgcgattaaacttaccattcagggcgtaaaccaggctgggtatttccagacgtggatgtttgtgacggtttcagctatatgcttaatcatccagttagtttacctgaacaaggcattggatactttcaatacagcgctggtttctcccatctattatgccatgttcacaaccctcactattttagcaagtgccataatg

SEQ ID NO: 10923 - DNA, 424 bp, Triticum aestivum
  Clone ID: LIB31-026-Q1-E1-E4
gcttcacgtcatgctgcgcctccgcggcggcagcagaggtggataccccaagaaccttgagcccaacctccgcatccttgctcaaaagtataatgagaacatactagtctgcctcaagtgctatgcacgactacccaccagggccatcaactgccgttagaagaagtgtggccatagcaatcagctaagggaatagaagaggtttatgtccaagtttgccaaggcttcctaaacgttggaaatatgctgaatcagccgtccaacgtcatacatattggcgtttaagttctgtcccttgtttgaagtcacgttggatttcgcagaatcgtctaacgtcgtcatatataatggagtctaagatttgtccagttgatagtcctgttggattttgaccctatgtaagctttggcatacattacctagc

SEQ ID NO: 10924 - DNA, 161 bp, Triticum aestivum
  Clone ID: LIB31-026-Q1-E1-E5
caggtccgagactcgcgggtcgacgcaacacggtataatgagtcgtacaactcctgcgcatcgagcgaacgggggaagagggaccgctccttctgcatcgccgcgagccgctgcagcctctggcgacttcacgcccttcctcgtgtcaggttttggtgcca

SEQ ID NO: 10925 - DNA, 473 bp, Triticum aestivum
  Clone ID: LIB31-026-Q1-E1-E7
gcctgccaagtacggtccaaccattcccgggtccacggtaaaaaataaatagtaatgtgtacatcttaatatctagccccatattaagtcgttggtttatttttttgtgagggtatctgatggtggttttctacaacctttttttaaattgtgcatatggtagaaattacaggtggtgccctacaaaggaacagttgccaccagtacaaaagaattagattatgatctatgaaaaaagcacaagtttacatatgtcttgggagttgtatcaatgttccttacatgagagattatttactcagataaaaataagaacagtagtcttttttggaggaaacaagtatgctgagataaatatctgaattcttttttcatgtttgactgggagatattggttagaaagctactttaccgtgtcacacatggagaagaagacgattggaaaatttcttccaaataattacgaagtcatg

SEQ ID NO: 10926 - DNA, 346 bp, Triticum aestivum
  Clone ID: LIB31-026-Q1-E1-E9
cgacttcgacgtcaagcgaaatcagcagctcatcgaaagacgggacacctccgcctctatcaagtggtatcagatttccaggttgctcggtgagattttacagtttttcgtagattagatcgagtctgttcttcatacctatagtccacgtaaaagccacacaaaagaaaattagggttagttcatcatatccgaaccaatctgagccgtgcacaatccttttatgggtttgcattgttgaatttgcggttgcatcgtcgtgtctagatgctgggcgtagagtctactcctttagagtttcgagttctggtcagaaattgtgacgccgccggcggaccatcatcat

SEQ ID NO: 10927 - DNA, 437 bp, Triticum aestivum
  Clone ID: LIB31-026-Q1-E1-F1
ttccgggacgacgagatgagcaagcgcaccaagaaagctggaattgttggcaaatatggtacacgttatggtgccagtttgcgtaagcagatcaagaagatggaggtgtctcagcactccaagtacttctgtgagttctgcgggaagtttgctgtgaagaggaaagcagttggaatttggggatgcaaggactgtgggaaggtgaacgctggcggtgcttacaccatgaacactgccagtgcagtcactgtcaggagcaccatccgtcgcttgagggagcagactgaagcataagttgctaccagcagtgttttgtcctaaggaattatctgttttttgtagtttagacgatactttggattcagttctgttggctgtttagtcaacggtatcattgtacttggtgccatggatgtttttgttaaggtattcccccc

SEQ ID NO: 10928 - DNA, 206 bp, Triticum aestivum
  Clone ID: LIB31-026-Q1-E1-F10
ttcccaagtccacagtggcatgtgatgaagtcaaagtcgctcgttcatggtgaagggatggtgatcgcccttgcttggagagaagtgatggcgatgacacgatgacaccaatgtgccacctcgacatgtcttctttgtagtgttatgtgtcggttacctggccggtgccgctccgttggactgttaatgcttttggcccggttttt

SEQ ID NO: 10929 - DNA, 412 bp, Triticum aestivum
  Clone ID: LIB31-026-Q1-E1-F11
tccacattgatcccgataatggtgcctatgaaggtctcaacacagagcttcatctgttgaatgagagcaccgacgatcaagagcagtttgcagggacatacagtacaatcatgcatgcatgggaagagatctgaacgagacttttgtttagattactacggctactagctagtacacaagtcaattcatcagagactaaaccgacgaacaaactcaatacgcgtatggatacattataagttgaacccaggaagcacagatcttagcagccatgcaatctccccaaattaacccatcgatggatggtcatggtataattaaccaatactattaaggagtatgtcagttgtagagattgagatcaaccgcagctttacgtacgtaaatgttttaccctgatgcagatggatgt

SEQ ID NO: 10930 - DNA, 337 bp, Triticum aestivum
  Clone ID: LIB31-026-Q1-E1-F12
gaaactaagtcatagcacgaggagatcgccaagctcacctccagctagaagaagatgcaagaggagtatgcctgctcccctcgaggagattcccaagctcaccgctgcctgctgggagaagatgctccccttgaggagatagatatccaggctcatcgcactatacggagccatgttttggccccaagtttcctgaagtgtaatgctgcttcagccgtgtctttctgccgtgtcgctcctcaaatgtagtggtaacttaaaacgtgttatatatgtacatgtttgattccgatgacatcggggttttcttctgttctactatctgtttgatctgcaa

SEQ ID NO: 10931 - DNA, 429 bp, Triticum aestivum
  Clone ID: LIB31-026-Q1-E1-F2
gacgttgagctcaggcggtggcgcgtttcggtctctgatgaatagatggctacgacaagcaatcgaggcggaggagagaggggttcgctctgtgagctcacagtgagtccaacatgcgtgagggagaggtcggggatgccctgtagctcccaaatcggcggcgaggatccatggtggctggcgatgggaacggcgatgctggcgaagttgtggcgcgtccttcactccatggcttggtggagaggacgaggaagacgcggcggtgctttttgacccagtggcacgacgtggggtagccggtggccgtgagaacagcgagcggtggtgacaagctctactcgggttcctctagtcttgcgagacacggacgaggacgagggaatgaggccatgggtgtcggtgggagtgtgtggcgtcgcctaagcgcat

SEQ ID NO: 10932 - DNA, 458 bp, Triticum aestivum
  unsure at all n locations
  Clone ID: LIB31-026-Q1-E1-F3
gggacgacggcaagatttatgatgtgaccgcgtatttggatgaccatcctgggggtgctgatgtgctgcttgccgtgactggtatggatggcaccgaggaatttgaagatgcgggccacagcaaggatgccaaggagttgatgaaagattacttcattggggagttggacttggacgaaacacctgacatgcctgagatggaggttttcaggaaagagcaggacaaggacttcgccagcaagctggcggcttacgctgtgcagtactgggccattccggtagcagcagttgggatatcagccgtgcttgctatattgtatgctcgaaggaagtgatgatcggttataggttgattgaaggaccattttggggtaaccaacacatttatagctggttatggatggagagattatgtacttctgtccanaggggaagacacattgctgtattgagccctt

SEQ ID NO: 10933 - DNA, 449 bp, Triticum aestivum
  Clone ID: LIB31-026-Q1-E1-F8
tcccgggtccacaagacgacagaaaggggggttacaagacattcgacagaaggacacagttagaagcatcacattttttaaaggatgactgcctagtaatgaactgcacagtaggtgtcgtcaagaaccgtctcgaaacaccatagaatatccagattaatgttcccccatcggatattggccgttgcttcaaggagctcttcgaactccacattggctgtgacataacttttgaagtaagtgatgagaaagtccaggcacatgaatggattcttgccgctcgctccccggtgttcaaagcccaattctttggacctattggtaaacctgacatgggcatagttgttgtggaggatgttgaacctatcgtcttcaaggcaatggtcaatttcatatattctgatgagcttcctagtattcatgaagtagctgggtctttctcaatgtgg

SEQ ID NO: 10934 - DNA, 267 bp, Triticum aestivum
  Clone ID: LIB31-026-Q1-E1-F9
acctcgggaaatcacacaaatcacctactccctccttcccttactttggatactctctagtcatgtgactagtagtaatcatactcaaagtttttagtcaggccctatttggaacgtgactactactagtcagcactaaatgtctcaatattaaattcttctctctcccttccatttatctctcttcactcacttgtgcaacaacaattatcgctatactcacgcgcaaggaaagaaagcagcacagtcctgttccttttctccctc

SEQ ID NO: 10935 - DNA, 410 bp, Triticum aestivum
  Clone ID: LIB31-026-Q1-E1-G10
cgttgtgcatttactttgacaagtagcttcatctcgcagttccacacgactttcattttgcacgtttttttacgatcatagaagagtagatctacaccatcctcgtgagtgtacatatgcatatgcgtggtctgattttagacactccttaattattcctctaggctttttatcccacgtcctgttacactgacgccatcgtcggtgtggttctgctcgatctcctcccctgcgtcttgctgtagtggcgtcatcatcgccaccgttcacctcggcctcctctcctacagcctactgcactgatgttgtcatggcacgcacactatatttcttctcctctatcctctgcctcagaaccctgcgattcttccctccgcataaaccttttgtgtggtgacgacgctaggaac

SEQ ID NO: 10936 - DNA, 412 bp, Triticum aestivum
  Clone ID: LIB31-026-Q1-E1-G12
ctcgcgagtccacgaatgtcatcatattgaatcgcaagctttcggcttcacccagtctgaggtactaactcggatgacccagtagtaacaatcacagaggtgctccctttaccgcctagccgaacaatcgggaatgtaggggtaagcacaggagccaggcaacccagcttggcaaaaatcttaagtcaaattgatgcatatttatggctttataacgatgattacggaaggcaacccttgtatattaaatacaaatggcgatgatatgtttattttgactccgttgcgaccgtttatcagttgaaagtggcccatcgtcggcttctacccctttgtagatactacgcatggtgtccccccaataacaagacaacccttagccgacgtctcggtgccccaaagcggttgtgtt

SEQ ID NO: 10937 - DNA, 398 bp, Triticum aestivum
  Clone ID: LIB31-026-Q1-E1-G9
cttggacttcattaccatggattactctagaagtttgccatttggattccggagtttgaattaccatagaggtgggcatctcacagaatgtggtgttatgcagacgagcatagctctcggatataaatgaatgagatgctcctgtatcgaaaagcacagatgccgggtggcgattaacaaggagcgtaccgagaacgacgttgggatcttcttgagccccttccgcagaaacacaatttacatgggcacgagcagtggtggccggcttggcgtacaacactttccctgtcggctttccgcagccaacagtttttgctgtctggttggggttggtttggggacactcgcgcatatagtggcctgattccccacacttgaaacaagtcacggaactggta

SEQ ID NO: 10938 - DNA, 233 bp, Triticum aestivum
  Clone ID: LIB31-026-Q1-E1-H12
caccttgcacatccaactacgaccgtgcaagacgtcgcgccttagcaatctctaaaccaacctccgaagggttattgaccacaccggagcacgatcaacctgaccacgagggtctgtttcctgcgagcaaacgaagaacaagcaagaaactgagattgcaatttggatattgcgaatataagatgaaagctttattgatcaaggtggggttccataacccctttgccgggttg

SEQ ID NO: 10939 - DNA, 452 bp, Triticum aestivum
  Clone ID: LIB31-026-Q1-E1-H4
ttccggaaccacttagacgtcgtgaagtctaagtcgcatgacgtcatcatataaaagttgattgaatgtgactccgtttcttgttctgtgttcgctacagaccacatgggcttttgtttagctggagaccacatgggcttttgttcggttgtgttgcactcatccatcgttgtgttttttttttatttagccacctaatacatgcattgctacactgtgtaatggagctccgattttgtggctagcttcgctcatgttccgctccttgcattcgtgtcatcttgttacaccttttcgtttattatttaaaacaattactttatatttaaaaaaggacacattttttttaatgtaacaatgaaataacagccaaaaattcagaagaagacaattaatttagttgggtgcaaacataggatatacaactatgtgctgtcaactagcgtgcaaat

SEQ ID NO: 10940 - DNA, 375 bp, Triticum aestivum
  unsure at all n locations
  Clone ID: LIB31-026-Q1-E1-H9
gatatgtgcagtgcggagatcttgcgccagtggcaacaaaacatttgctcactcatcttcagaagacttgaagctcgacgccgaaccgccttgacttgcaaacaggcangaaggttagagattctatgttttggagagacagcggttcacggacgaagcttgtctgcttgctcatgtttctcgtgcctcatttcaaccatgatcactcgatgcagtttgttatcaatgccccatatagtttcacaaagaaaagaggctctccacagtaaatcatgaaatgcaccgcgatgctgccagcgcttgctcaaggatgaaggatcatggcgcanggcaaatgagacgcatgcaaccggtacctgtctaagctgatcatgc

SEQ ID NO: 10941 - DNA, 302 bp, Triticum aestivum
  Clone ID: LIB31-027-Q1-E1-A1
gggccgacacgccacgtaaaacagactactgtcataaaaatgaaaagaagcagctctgcttacggagataagttgtcccgaaaggaatctggaaattatttcacctacttttctccatctactgaagatgaagatgtctgcccaacatgtcttgaagattatacttcggagaatcctaggatagtaatgcagtgctcacatcacttccaccttggctgtatctatgagtggatggaaagaagtgaggcatgccctgtttgtggaaagaaaatggagttcaacgagacgacttagacctcaga

SEQ ID NO: 10942 - DNA, 433 bp, Triticum aestivum
  Clone ID: LIB31-027-Q1-E1-A10
ctcgtgggtcgacacgaaacacaactatgtcagtccttctacaaaatgtacgagcggctcgggtcttgcgtgcagcggcggcagcaacatcagcttccattgaggccaaagtgttcgccagaattgtccttaggaatctggaacaccatcaggcagggacttcaacctgaagacacaatggcgagcacaagcgcgacgaattctccaacagggtatgacttctaacctttggccccagaatggatgcaaactcgcggttaagttgtcgccggcatttgaagctgccgcgcaagctgtgaccttggaacttccaccttgaggagaactgtcagaagagatgaatgaacgttcaaccggcagctgttgagtgtgcaattttcctgttgtttgtctgatgtgtaaaagtaacttaaaaagtgttagcgttagcatc

SEQ ID NO: 10943 - DNA, 435 bp, Triticum aestivum
  Clone ID: LIB31-027-Q1-E1-A11
gtcccgggtcgacacgaaacgataaaatgacacataggaggttggcctatgaagattgcattggcaatcggcgctgttcatagatccaaccacccttttgcttgatgagccaaccagcaatcttgatcgcaaagcttgtgtctggttggaatagaaattatgcaattttgagcctagacttgttgttatctcgcattcccaacattttctaaatggaatgtgcactatcatcagctacatgcagaacaagaccctcaagttatatactggaaattatgatcagtatgttcaaactcgctctgaacttgaagagaatcacatgaagcagtacaaatgggaacacgaacagatagctaatatgaaggacgtacattgtccgatttggtcatggatctgcgaaacttgctcgtcaggctcagatcacagagaagactc

SEQ ID NO: 10944 - DNA, 437 bp, Triticum aestivum
  Clone ID: LIB31-027-Q1-E1-A12
ctcgcgggtcgacgatttacccaacatgtcactccttctactccgaagacatcaacggtatggacgccgatgaaggagacgaccaagaaccagcacctatagggcactggaaagccacgccatcatacgatgtatacatggtggacacacctaaaagaaacaacgacgaggatcaaaagggcgcaaccaggaatcgctccctcgaaaaacaatcaaagcggcagcgtaagcgccgcgccaagccccacctcgacaaagacccagccatagagcatggcgaatcaacggaagatgaacatgccatcgagcaaccgtccaaacagggcggacaaaccaaacaatcagtccccgggaaagataatagtccggacgacctcacgccggacaagttgccagaacatcagaacctccaccaaaggctcgttgccactacacgt

SEQ ID NO: 10945 - DNA, 360 bp, Triticum aestivum
  Clone ID: LIB31-027-Q1-E1-A2
gggtcgagaccctcgggaacatcaacaggtcggggaccaaggagttcatggaggccctcgccgccggcgccgacgtgtccatgattgggcagttcggtgtcggtttctactccgcctacctcgtcgccgagagggttgtcgtcaccaccaagcacaacgacgacgagcagtacgtgtgggagtcccaggccggtggctccttcaccgtcactcgtgatacgtctggggagcagctcggcacgggtaccaagatggtcctcgacctcaaagacgaccagatggcataccttgacgagcgccgcatcaaggatctagttaagaagcactctgagcttatcagctaccccatctccctgtgga

SEQ ID NO: 10946 - DNA, 203 bp, Triticum aestivum
  unsure at all n locations
  Clone ID: LIB31-027-Q1-E1-A3
ctatactaagtcgtattataagangctctggctgggcagcagtgaggtggcagacggacgaaggtggggtttcgcggctggagcggagaggttatgacggccggatttcgaatggcgaaaaggaggcgatgggagggaggaaccatgacttagggacgcgcttgtccaaaatgtanggtgtgttacaaaagtacccccgccga

SEQ ID NO: 10947 - DNA, 404 bp, Triticum aestivum
  Clone ID: LIB31-027-Q1-E1-A4
gtctaggacacgcgggccgaccatggcgtctaccaacactgggggcatccccatcaaggccgaacaggattcggatggctcggcccacagcacagctgacatgactgcttttgagcaaaatcttctagttcagatgcacaccaggttccaaaccatgtcagagaacatcatcacgaagatagatgaaatgggtgcaagaattgatgaattggagctgagcatcaatgacctcaaggctgaaatgggcagcgatggtatgacccctactagagtgaacgacgaagaatcaaagccagcagacagctcttcctgagtgaagcagaagtagcagaagcaaggcgtattagtcttggttccatgtcgatatcatcagccattcatcactaacttactgcaggttagga

SEQ ID NO: 10948 - DNA, 309 bp, Triticum aestivum
  Clone ID: LIB31-027-Q1-E1-A5
ggccgacttctaacaacatcactgatggttacaacttcacgtctcttcatgatcagcttcagctgtaatttggttccagcctaagcaaccgaaacctcaacttgcaaattgtccaagtataagggcaagccagccaaaagtaggtaccaatatgtgtcaggctgatcatgcgagagagtagactactatcaaatacccagttacatgtacccaatttaccgagcatatcatagggcacatgtaccaaaaatgttatatcagacatttagtggaagatcacaaacttctgaaaaaaatgctgaagcatct

SEQ ID NO: 10949 - DNA, 263 bp, Triticum aestivum
  Clone ID: LIB31-027-Q1-E1-A9
atgacttcaatgatcttgacatcgatcgcacaaagaaagcttggtagagcgaccacgtaggggagacatatgagactgaggatggaatgcatcgatcaatatgcagtggtgcacaaccgttctttcagagagaacctttcacaatccgcatgagtttcctcagctccatagccagatatcgacctgtcgcccagaacctgggttgcctctggtgtccacaaaatatctgtgcaagtctaaggctggaagggaccagattccgg

SEQ ID NO: 10950 - DNA, 389 bp, Triticum aestivum
  Clone ID: LIB31-027-Q1-E1-B1
cgggtcgagacttagaaaccaaacacacagcacgacacaagatcggcatgacaaaacaacctgcgatcaagatttgcttgacattgagtgaacatatgacatagtgaaaaaaagctcataaatttaaaacagataaataaaaataaaaaggaaaaaataaaaataaatggaaaaaggagaaaaattatatttaaataaaaaaaatcaggatttctaatagttcataattaaaaaataataataaaatagaaaaaataaatggaaaacggaaacaaaataaaacaaatacagggtgtcatatggaagtccacaaaaataagaagaactaggaccgattcatggcagacttcaaaaaagaaaaaaaccataaaaaaaaaagcggccgctct

SEQ ID NO: 10951 - DNA, 307 bp, Triticum aestivum
  Clone ID: LIB31-027-Q1-E1-B11
aactgtctacaaccattgttagtcatgatgtacacaagatcatcgattcagctgtaagacatacaaacggtacaccacaacggatgaggccaaaccaagatacgccctctatctaccggtaaaggggacgatcgtttgagaatggatcaatacagtttcatcatggaaatcacatcatgatgaccgcagctctcttctatgtgaacgtactttacatgattgatatcgacatgtcatgtgatcatatcatcgctactcacggtctcgaaacttgttacacactgttctatctgtgttcagtcttttc

SEQ ID NO: 10952 - DNA, 423 bp, Triticum aestivum
  Clone ID: LIB31-027-Q1-E1-B2
gggtcgacctccgtctgcagcttcatgccatcaatgtggtactaatgcacataatacacctatgatgcgtcgtggacctgaagggccaagaacattatgcaatgcttgcggcctcatgtgggcaaataagggcatgttgagggacctatcaaagtctactcccccatctcttcaaatggtgtcaacaggtccaaatgatagtcagaatggaaacaccctctctcagcagaatggaagcaccctctctcagcaaaatggaaatgctgccataatgccctttgccgagcaacataacccagcatcagcgaccgatgccaacggtcacggccatgggtcttcaacaatgatgagcgggattgctgcttgtttttaacggtggatggatgaaggaacgtcatcctcctccttgagtgaacctcctgt

SEQ ID NO: 10953 - DNA, 242 bp, Triticum aestivum
  Clone ID: LIB31-027-Q1-E1-B3
agaccggacactaactccgccgatgatgatgaccagcttggtggctgctgttgacatgccctgcttcctttcctgtggagatgtgttcatcggcgtgtaatttttgtacatatcgactccgtgccatttggtcgctgtaagacgcctcaatgcctatgcagcaagtgggtggagttgtgagtttctgaatgtactgggaatatgggtgtagtgatgtcagcataagaatgtcatgggagcag

SEQ ID NO: 10954 - DNA, 404 bp, Triticum aestivum
  Clone ID: LIB31-027-Q1-E1-B4
gggtcgacgagattgtcaatcctgggtccgtatatctacacaatatgttcccctttgagaggttcatgggagtcctaaagaaatatgtccgtaaccgcgctaggccagaaggaagcatctccatgggccatcaaacagaggatgtcattgggttttgtgttgacttcattcctggccttaagaagataggtctccctaaatcgcggtatgaggggagactgactggaaaaggcacgctatgagcggactcaataatatgcagggacgggcattcttggtctcaagcacactacacagttctacagaactctaccttggtgaccccatatgtcgatgaacacaagaatagtctgcgttccagacacccggagcagtgcgacgactggattacatgtgaacacatc

SEQ ID NO: 10955 - DNA, 442 bp, Triticum aestivum
  Clone ID: LIB31-027-Q1-E1-B5
ggtcaagaactcgcgggtcgacattaaacacgaaatggagtctgatcatgaaaacagggatgtgaagttgacatacaagactctgaaggaaaagatcaaggaaatcaacaagaaggatgccaaattctacagcaatatgttcgctaagatgaccaagccttcagcagaagaaagcaaagcttgaactggagcagtagccaaaggaaggataggagtcccggagtgcgctcaaggaagggtcagcttgtctgctcagctctatgggctggttagatcacacatgtgcttggagttgctatagactagagaaatttcagttttgatattgccaggcgatatttttttcttgtcaagaacaatgcatgtttagagctttgcatattacagtgtgtgctttccgggaaatagatggtcctgccttaagaatctgtgttgtgtgcca

SEQ ID NO: 10956 - DNA, 420 bp, Triticum aestivum
  Clone ID: LIB31-027-Q1-E1-B7
gtctagaagtcccgggccgactgataaggaaagcatgaatagaggaacgcgtgtaggggaaggtgcactaagggaagttgcggcttatattctcgaccatgcagttggtgatcgtgaatcgggtcacggtgttgggttttctggtgtgcctcccacagcattagtccgaagcttacataggggaaagagcttcaagtttggatctctgcagatgtttatggagaacgatggaagttgcgaggatatgggtccccgtgcttttccagtgaaggaggtacacaaaatagcagtgttagatattaggttagcgaatgctgatcgtcatgcagggaacattcgagtgtccaaggaagaacgtgccacctgcaagctgattccaattgatcatggctactgcctgccagacaagtttgaggattg

SEQ ID NO: 10957 - DNA, 338 bp, Triticum aestivum
  Clone ID: LIB31-027-Q1-E1-B8
tcccgggtcgacatgtcacgcaagtgttctacttgggcacgtacgataagcatctccagcataagtacgacctggccacgcccccccccctcacaagcacaccatacagcggtgacgtacgcgacatgacatatatatatatggtggggacgagcttatgacggcagtgcctgtgaatggcccttttggtcggtgcagggcgctgcactcatcagtaatctaccccgacaaggtcctcagtgccatcatctcccgcctcccctcgacagatggtgactgccaagcacatgatctctctcgctggcggcgcttgcccacacactccattcagcttcgaa

SEQ ID NO: 10958 - DNA, 172 bp, Triticum aestivum
  Clone ID: LIB31-027-Q1-E1-B9
ctaatgaatacgattttcatcgttcttttgcacatcattatcagcgcaacgctcttctaagtcacggtattttaaattatcaatatcgtcttgtaatgtgaatacatactcgctactcccggtctctagacttttgagtatattttctatcattgatctgtcttttcagttc

SEQ ID NO: 10959 - DNA, 414 bp, Triticum aestivum
  Clone ID: LIB31-027-Q1-E1-C1
gggtcgacactacagacgatgatgactcgtaatagtttacacacaacgtccaagatgaatggcttgccatacaccttggccaagagaagccaacaacaatggcagcattaacaggcctcatgacccacttttgtgcgggcgatgacagctggctatcccgatgcagcaccagtgacccaagtacatccgaagttagagatggaaacgggaaatcacgacgcagcagaaataataagtgccggaataaagaatacaacccgattgagcatggcggttaacaccggattcagatgctctcggccaggtcagcaaaagccgcctctaaaagcgccggagatgaactgtccagcctaaacaaagttctggaccaaatatgtcagatccatagcacccctgataaacctgcaaatcata

SEQ ID NO: 10960 - DNA, 241 bp, Triticum aestivum
  Clone ID: LIB31-027-Q1-E1-C10
gtacgtatcacatcgaaagacgggacacctttgccactaccaggtggtatcacatttccaggttgcttggtgagattttacagttttttttgtagtttcgaccgaatctgttcgtcatgcgtagagtccagcagaaagccataagcaagcttaggatgagttcaccctatccgaacacatctcagcccttggagaagctcttctgtatctgcattgatgaagttgctgttgcatcattgtg

SEQ ID NO: 10961 - DNA, 289 bp, Triticum aestivum
  Clone ID: LIB31-027-Q1-E1-C12
tccgggtcgacgagcacagtatcgcggttaaggtccacacgagtgatacaatgatgcggggtccggtcacgagcgaagaaatatcgcgagtggtcacggagcttatgctcggagaggccggaaccggagcggcaaataatgttgccgagttatcggtgctggccatggagtccgtactggagatggggtcttcgtgcaaagcaatggatgagatcatccgtgagttgtgtgcacccaacatcatgcaggcacacgttgacgcgagcaaggaggagtccctagatgttta

SEQ ID NO: 10962 - DNA, 276 bp, Triticum aestivum
  Clone ID: LIB31-027-Q1-E1-C2
ggtcgacacaaatctctagactgactcgacataggaccgacaagtggagcgcgttttgacaggcacctgtattatatagaggtcatgatgtgtgtgtttgtgcaccttactgcatatatatatacacgtacaaggaaaggcaagacatttttgcttgggacgagacggagcttgcttgtgtgtttgctttgcgtttgttgctgtttatacctaaggtccggtcggatcggatgttggttcaattgcacatgtttggctgggatgaatcgtgcttat

SEQ ID NO: 10963 - DNA, 407 bp, Triticum aestivum
  Clone ID: LIB31-027-Q1-E1-C3
gggtcgacatcacggataaggtgcctgatcagcaaatgtggttcaatcattacggagatacgaagaacatcgagagcaaacatacggatcatttcgaaggaggatgttccaaaggtagcatcggacgatgaagagatggtccagatcggcggagatcttgatgttgcaaggcatgctcttgtgcaaataactacaatgctgaaagccaacttctttgaaagagaaggtgctttatcaggttttccacctgtgatcccagagcacccttttgcctgctagtgtgcccgatgagccaaagtatctaagcagagacagtaagtctgctgggcacgattatccatattcgattggatatcgtgcatcagacgatgtgcttcctgttgaccgttatgcagattatggcagct

SEQ ID NO: 10964 - DNA, 338 bp, Triticum aestivum
  Clone ID: LIB31-027-Q1-E1-C9
ctgctaagctgtcagcataaatttgccacgatgggaacgaggactttgaatccctgtgcgatccggccacttatcacggggcaccacggcacggcacgatgtggtttcaagaggtaaccccgaggattcgtggatacattccagagatacgccgggccgatcagtcgtgaccttctgtgtcctcctcttcctcggtcggggtggactggcgtggatcacaccagcccggtcagtcatgttcgtaggtacaggctgctgcatgctgcattctccaacaacctacgtactccactcagaatctcgtgtcaggaacatgtatcggaccggtggctatgcta

SEQ ID NO: 10965 - DNA, 426 bp, Triticum aestivum
  Clone ID: LIB31-027-Q1-E1-D1
gggtcgacggagaagaaaaagttgaacacgatgcgggagatcaaggtgcagaagcgcgtcctcaacatctccgtcggcgagagcagggatcgcctcactcgagctgccaaggtgttggagcagctgagcgggcagtcgccagttttctccaaagcgaggtagactgtcaggtctttcagcattcgtcgtaagtagaagattgcctgctatgtgacgatcaggggtgagaaggcaatgaagcttctctagagtgggctgaacgttaaagagtacgagctcttgatgaggaacttcagtgacactggttgttttgggtttggtagtcaggagcacattgatcttggcatgaagtataaccatcaaccggcatctatggtatggacttcttcgtggttctggagcgagctggataccgcgtctcccgcc

SEQ ID NO: 10966 - DNA, 392 bp, Triticum aestivum
  Clone ID: LIB31-027-Q1-E1-D2
ggtctagaactacgcgggtcgacggatccagcaatgcaggttctcaggagcgtgaagtattgccggcgtcatgcccattgagaagatgcagattttctttctggttctctagattggtcttgataaagctttcatacaggatgcagcttaagctggagttcgtcgctaagcaggaaacatggctatcaattatcttgtatacagaatgtttgggactggatcttgtaatgaaagctggagcagaagaagtccaggacggaaaattcggcttccacggcaatgccgacgtgctcccctcgggttcctgcagttcgaggacggacagcccaggttctcaagcagcaaagttagcgcacaaagttgaactttgctgctgcaccatcgtcaacaag

SEQ ID NO: 10967 - DNA, 177 bp, Triticum aestivum
  Clone ID: LIB31-027-Q1-E1-D3
gggtcacacgagatccaaatgaagaacatcagtggatgccctcatctggcgcaatccgttcactgagccggcaatccatccttccgaagctacgatgtccttccaaaaaagccaaggcccacctggttgaaacccgtggaacccttttaaggcaatttccttaaggactgaaaaacc

SEQ ID NO: 10968 - DNA, 396 bp, Triticum aestivum
  Clone ID: LIB31-027-Q1-E1-D7
ggtcgacacgctccgggagtttgactcggacaacgttcgcctcgtcaagcgctgccacaagcccgacccaaaggagttcaccaacgtggtcattcggacggccatcgggtttcgtcctcatggggctcctccgggtcctccttcagcctcaacttcatcccaatcaaaacaatcatctccggttccggcgaatccctcttcccaaggtaaggggcccaaggccaaaaggatgttttcaatccatgaaggcgcccctggtttcctaacccccttaccttaaaccaatcaattaaggatttaattgttaagagaatttccctttgttttccatttgaaacagttgtattggtagacctggagcagttttgaaccttattccggctagaccgtaatatc

SEQ ID NO: 10969 - DNA, 271 bp, Triticum aestivum
  Clone ID: LIB31-027-Q1-E1-E1
gtcgacgctgctccatatcgacagtcggggaagcaatccaccaccatcacacttgactagggtattacaccacaacggtggcccagaccagtataaacctcgtgtctttctatgttgcgagttcgtcgagtccgtccgccagatcttaccgagctatggcgtcaatcggtaggagggaaagacttcgcgcgcaccccattgttccaagcttaagggtttgccagaatcccacatgcggcaacgacagagagtcactccagggttcctatcg

SEQ ID NO: 10970 - DNA, 219 bp, Triticum aestivum
  Clone ID: LIB31-027-Q1-E1-E2
gtctagaactagcgggtcgacacgaagacgacagaagggtatcttttgagtatggctttatagaatgcttcatgtgcttcacttatatcatttgaactttggattgcctgtttctcttcacatataataccggcatttggacaatgctcttttgcgtcagttactatctgataaagcgtgggcatagaatttgtatacagagtggaagtcccttgcttc

SEQ ID NO: 10971 - DNA, 333 bp, Triticum aestivum
  Clone ID: LIB31-027-Q1-E1-E3
gggtcgacgaagttgttaaaacaggagtgacacctgccgagaagcttctgaatctatacgagacgaagtggcagcgcagcgtggaccctgtgttcgaggagttgttatattgatatatactgatatcatatataacttcggtggacgctggacaacgtggacacggtcttcagattgtatccccatacaaaatcccgtccccaattctacaagccacctgaccagggaaacctactctccggtctcgtggctgctaccaattttgaacgcggaacactctgtttgtggcgttccggcccttcttttttcggccagtgtcgaccttttagagct

SEQ ID NO: 10972 - DNA, 308 bp, Triticum aestivum
  Clone ID: LIB31-027-Q1-E1-F2
gggtcgacgtcgaggcacactaaatgctaagttttcatcatttagggtttatcgatgccgaggcaccctaggttgggcctaatcacttggcactaatcagttggctctattgccacctatgttgggtttatcatctacggtttatcgatgctgaggagaatttctaagttgggcctaatcacttggctctattgccacctatggtttaatgcagcaggaataaaggggcatttgatcctacttaattaagtactaagataccccggcccttgcattaatagcaagtaccgcatatgtccgatttttag

SEQ ID NO: 10973 - DNA, 268 bp, Triticum aestivum
  Clone ID: LIB31-027-Q1-E1-F9
ccaggtcgacgtatcacatgcgccttcggtccaatggctggatgacatctgtcctaacggtgagccgacacgtgtttcctccagccaatgatggttgtacacgtggaatatccccattggtcggggctgttaacgggttatcggatccaaaaccgagcccgatagctgaacggtgttccatcacggtggacgccacgtgtcggtcacccttgatgaaagcacttctatgacgcgcgatttatcgtcatggaagtggacactttcgtga

SEQ ID NO: 10974 - DNA, 365 bp, Triticum aestivum
  Clone ID: LIB31-027-Q1-E1-G4
gggtcgactttgacgatcagactacgaacgtgcaaggacgttgcgccttagcaatcgctaaaccaactccgagaggttattgaccacgccggagcacgatcaacctgaccacgagggtctgtttcctgcgagcaaacgaagaacaagcaagaaactgagattgcaatctggatattgcgaatataagatgaaagctttattgatcaaggtggggttctgtgacgcctttgtctggtcgttgaacacaaacgaagtacgcgaagttgcagctatggcgaacttttaatctaaacaaaacccaacgaaaagctactagatggatctacttacataggactaaggggtggcggccaaggaggtgggag

SEQ ID NO: 10975 - DNA, 287 bp, Triticum aestivum
  Clone ID: LIB31-027-Q1-E1-H10
gccgacgtcaatggcaaggtcaactgctccaactgccccctctccggcgggatgtactacgcgggtttcatcccctacgtcaactcatacacagagatctacatattggccaagtgttcgtcgatctgcaaccctgtttaagagctggattggacggtccaattcaacacggaactatgtgtctgttgaaacgtttcgtctatcaagtgtcgcctcgccgcctccggacagcccgacgacgccctcgccttcgccaagctccactcctccatgaggtgatttgtttc

SEQ ID NO: 10976 - DNA, 299 bp, Triticum aestivum
  Clone ID: LIB31-027-Q1-E1-H11
gggtcgacgctacacctgatgctcagcactccgcagcggcaccaggggaggctacctaaacgtggacccaaatctcctgcagctcgcgctcaggtacagcgagaagaagatggtctgccgcaagtgctacgctcggcttcccctgaggtcaagcaagtgccgcaagaagaagtgtggccacagcatccagatgatgcccaacaggaggttcatcaacaagctttcgaacttgacatcgaatcggtaggggagagagaagggaaggaccgtctgtgactaaattgtttcattcggtttag

SEQ ID NO: 10977 - DNA, 300 bp, Triticum aestivum
  Clone ID: LIB31-027-Q1-E1-H2
ggtggccgccgcgaagaaaatgagcttatcatggcttcaaaacgtatcctgaaggaactgaaggacttgcagaaagatcctccgacatcatgcagtgcaggtccttctggtgaggatatgttccattggcaggcaaccattatgggtcctcctgatagtccctatgctggaggtgttttcttagtgaatatccatttccccccggactagcccttcaagccgccgaaggtatcgttcaagacaaaggtcttccatccgaacatcaatagcaatggaagcatatgccttgacattctgaag

SEQ ID NO: 10978 - DNA, 322 bp, Triticum aestivum
  Clone ID: LIB31-027-Q1-E1-H4
gggtcgacatcacttgttcgaacacttgtcacaacattatcgtacatgtccttgatgagggtaatgtactttgctgggattttgtgtttctccaaggcccaccacatgacattccgctatatcttaccataggccttctccaagtcaatgaacaccatatgcaagtccttcttttgctccctatatctctccataagctgtcgtaccaagaaaatggcttccatggttgacctcccaggcatgaaaccaaactggtttttggtcacgcttgtcattcttcttaagcggtgctcaatgactctctcccataacttcattgtat

SEQ ID NO: 10979 - DNA, 347 bp, Triticum aestivum
  Clone ID: LIB31-027-Q1-E1-H6
ctcccgggtcgacactgaacacatgaaggcagtctgtcaaccccaacttctttgttgatttcgggaccgagcctgaaggtccctccttggcccatgagatgagatatcctggtggagaccgcacctctgacatatggatctaggaggaatggtgtacgacacaggcacctggagatccatggtgttgagctcactgtaattaaaatggtctcttccccgcctgcggtgttgtatgtgatgtggtatcaattggaataagttcctgatagaacccctgacattggcttcatgggagctttgggccctaataagagttgcctctgattctgaaatttctgatgctgttc

SEQ ID NO: 10980 - DNA, 440 bp, Triticum aestivum
  Clone ID: LIB31-028-Q1-E1-A12
ctcatgggtcgacgggacactctagagtgagtcatactagtcgaacatataaagtttgatcatggttatacctcgaagagtccagcaattgtcaatctacttgagatcatgacggaatttactccggagcaacaacatgcattctgccagtttgtgactggtgctcctcggcttccacctggtggcttagcctccctaaatcctaagctgactatagttaggaagcactcttcgactgcggcgaatacttcaaatgcagctggagcagcagagtctgcagatgatgatctgcctagtgtcatgacttgtgccaactatcttaaacttccgccatactcgacaaaggaggttatgcacaagaagctgctttatgctatcaacgaatgccaaaggtcgtttgatctttcatagtgggttcaaaactaacatacatgcaccag

SEQ ID NO: 10981 - DNA, 429 bp, Triticum aestivum
  Clone ID: LIB31-028-Q1-E1-A2
gtcaacagggatccctatattaagtcgtgcgacagtttccgttgggggatgatgacaccatgtgtggctactcgatgcctaatctcacagaattctcttgatgaacgctctcctactgtcagtactgctgtatcttgtggatgctaacaacgattttcagtacatggtactgttgtccgggtcaaggaaggtttacgcccagcggacctagatgtgctggatgttttatactgtataagactacgcatcacgtgctgaatgaatgttgctgagactctagtatcgcagtgtgttgacgacgcccacttgcttgggctcccgttgttaaatttgccacgctagctattgataaagatgggtttcttgttcaatttggatcttgctggcggtttaatttcatcatgagaggaaatatccgcatcagttttt

SEQ ID NO: 10982 - DNA, 387 bp, Triticum aestivum
  Clone ID: LIB31-028-Q1-E1-A8
aacgggggtgaacggcatggtggacaccctgaacaccaacctcccgcgcgccaagctcatctacatcgacaacttcgagatgatctccgaggtgctccggagcccctttaactacggcttcagcgtggtggaccgcgggtgctgcgggatcggccggaaccgcggggtcatcacctgcctgcccttcctccgcccctgccccaaccgcaacacctacatcttctgggacgccttccaccccaccgagacggtcaacgtgctcctcggcaaggccgcatactccggcggcaccgacctcgcctaccccatgaacatccatcagctcgccgcgtggcaaccgtagtttctttgagtgaggaactaagtacctatagctaactagctacg

SEQ ID NO: 10983 - DNA, 428 bp, Triticum aestivum
  Clone ID: LIB31-028-Q1-E1-A9
ctcgtgggtcgacgctgcgcactatactgagtcatattaggctccagggtggacaacactgtcctaaaggcaagcgggcgcgtcagtgctggttgccgacatctagcaatgcctctgtggcgaccagagatgtacaacgacgacaacggaggtagaggttgcggatgcaaagtaagggggggagtggtggagtggaaggaaatgagtccgggaaggggatttaatgggcctaggatgtcagagtcctacgtgactgttacccggattcccgcagccccccccccccacgttgtctccactttgcgggagaaagtgcgtccagaccgcttggtggaccgacataggcccatgttggatggcacaacacgtccaaaccgtgtggtccaaacggttgcggagagtcggcgattggagatgcccttagtgtt

SEQ ID NO: 10984 - DNA, 337 bp, Triticum aestivum
  Clone ID: LIB31-028-Q1-E1-B10
caccactccctatactcagtcgtatcacgcgatcaatgagatcaatgcagctgcaatgatgacggtggctgcatacgagaatgcggacgctgagaagattgtccagatcaaacgtgccgagggtgaagcagaggccaagtacccgtctggcctcggtatcgcccgccagcgccaggccattgtggatggcctgagggacagcgtcctgggcttctcagtcaatgtgcctggcaccactgcaaaggatgtgactgacatggtgctgatcacccagtacttcgatactatgaaagagattggcgcgtcctccaagtcctcggccgtgttcatcccccat

SEQ ID NO: 10985 - DNA, 398 bp, Triticum aestivum
  Clone ID: LIB31-028-Q1-E1-B11
ggtaaggttcccggagtctacgacgactgggaggagtgttggagacaggttcaccgattcagcggtaatagttacaaagggtacaccactagggccgaggccgaatctagatacgcccgctatctagcgggagaggggagggagcgttggaggaaccggatgaagacgagtttcatcgtgatgatgctcatcgtgatgaccgcagctctcttctatgtgacggtagtttagatgatcgatatcgacttgtaatgtgaagacaaactcgctactcgcggtctcgagacttgtaatataatgttctatctttgttcggtcttttcaattcggagactaatatgatgaattgtattcagagactaatcttctattgtattcgatgaatctgttgttgatgt

SEQ ID NO: 10986 - DNA, 433 bp, Triticum aestivum
  Clone ID: LIB31-028-Q1-E1-B2
gcgggtcgacataattcactagatagagtcataatattagagaagtttgtgtgtcgcggcaaattgatttaatgaagaaaaactaaagtttaattaatatataatatggttacttcgcaagcacgacaaaatcaagttgaaaccaaatgccatactatgtataaaacatgaaaaatggtttaatttgatcccagaaaggcacacaatgaaatcaaaatgcacgagtagacaagcatttgattttctaaaattgaagcttctattcttctaaaaactttagagtccacaaagcacacacaagacacctttgatggtgattttttgagggtcataaacaaatatgtcgtggtgttgtagcatgtactttgtttggaatcttgagtgtgtagacattttcttttaactctaagaccaccggagaaagaacacctcg

SEQ ID NO: 10987 - DNA, 181 bp, Triticum aestivum
  Clone ID: LIB31-028-Q1-E1-B4
ggtccaggcccgcccacaagataacttcgatcgcgctttcctatttagggtcgatagttgcaccgatggttaaggtgccactagtgccatcctccttggcggagaccctcgtggtctctggtggagctgccagtgtcttcttagacttgtcagtggagctctatggttcgtcgtcgacggt

SEQ ID NO: 10988 - DNA, 374 bp, Triticum aestivum
  Clone ID: LIB31-028-Q1-E1-B5
tcgtgggacgacaccatacacgatagggagtcgtattacacggtttcttgaccgatttgatccccggatatgcattgcgattcttgttaagttcgagtgaaaacaggtgtgtgtacgtggatttagatgggtgttttttcgttccatcatttctgcgcgtcgtctaggattaatttgttctgtaagattgagatcacagagtgcgagtagtacaaataaatagagttctttgagaacttgggggacgctgagtattctcctcaacattgataaatatctttgtatgtgcatcactcaattgtcagtgaggagaatacgctgaatagcatgctaccctagccagaatcaattaatcaagaatctacggttggtac

SEQ ID NO: 10989 - DNA, 355 bp, Triticum aestivum
  Clone ID: LIB31-028-Q1-E1-B6
tcgcgggtcaacagcacacacgaaaatgaatctcaataaatgctctgacgacataacttctctgtcggccaacatggtgagacgctggacacacgctgaaagcgagttacatttggcgatactgctgtaggggttctccacgcgccaatagctatcttttggattgctgaacgtcgtctgtggtgtaatgtgaaagtttgaggccatgatctgaggtgtaattgtgggcccgtgagaggagttcagtgtgtgtgtgtgtctcttgctgcattggccacaggaacatactacgtatttgtaaatagctaagcaactatgttggatgtgcacagacattgttgaaatggctgcatct

SEQ ID NO: 10990 - DNA, 422 bp, Triticum aestivum
  Clone ID: LIB31-028-Q1-E1-B8
tcgtaggtcgacactagacgctatattgattcgtatcagagcctcaatatccacatggatcaagcaaactctgggaagctaacctccctgcacttccacgcttggtccaagggcctgaaaacagggatgtactatctgaggacacgtgctgctgccgatgcgatcaaattcacagtggacactagtcttctcaaggataagaagcctgcgaatgctgaggaggaagaggatctccaggctaagatggcgcgcaggtgacctgctccctgaacaaccgggaggactgcttgtcatgtggaagctagattcatccgcgacaccctacgctaacctatactatcctcttactgttggcttgtcgttgggttcgatgatatatctgtagtggtaatctgcctatgcatgatgaactctgaattaaa

SEQ ID NO: 10991 - DNA, 249 bp, Triticum aestivum
  Clone ID: LIB31-028-Q1-E1-C1
tggtggtagtactatagtcatatatgtctatgtctcatattgcacctcaagctcctgatggtcctttcaggataactttcgtgacaaaatttccaaacgcaactgttgttatgagcgtcgaggaagccctggtggacatgattgactggttcaacaagaacctcaagtgaacctaatgaattggcggccatccttttgtaataagccagtgtcactcttcatgagtcaccacgcgagcatccacagttt

SEQ ID NO: 10992 - DNA, 95 bp, Triticum aestivum
  Clone ID: LIB31-028-Q1-E1-C11
gggtcgactcccctagggatctggaaacattggagtatttatagagcatacaggcggtccggggggcacccgacgttggcacaatgcactcaggc

SEQ ID NO: 10993 - DNA, 404 bp, Triticum aestivum
  Clone ID: LIB31-028-Q1-E1-C3
cataccatataataagtcgttggacctacaggaaggcattgggaagtaataagtagatgatgggttgctagagtgacagaagcttaaaccctagtttatgcgttgcttcgtaaggggctgatttggatccatatgtttcatgctatggttaggtttatcttaatacttttgttgtagttgcggttgcttgcaatacaggttaatcatatgtgggatgcttgttcaagtaagaacaacacccaagcaccggtccacccacatatcaaattatcaaagtaccgaacgcgaatcatatgagcgtgatgaaaactagcttgacgatattctcatgtgtcctcgggaccgcttttcctatcataagagtttgtccatgcttgtccttttctacaaacaagattgggcca

SEQ ID NO: 10994 - DNA, 443 bp, Triticum aestivum
  Clone ID: LIB31-028-Q1-E1-C4
gtccgaaactcgcgggtcgacatcactggtcacacattttactttttaggattctttctatgatgagaatagctcatatcatatgaacgtaaaaaagaagattatctcaagctttatatgcacttggtacgaagctcggctccagccaatggatttcagtgcattccctactgtttaccctaaagtccctcaacaagataacgatattgattgtggcattttcactatgaaactaatgggatggtgcccaaggaatccaacccctatagttttttcaccaaaaaatgtcccagatgcaaggatccgatatgctgttgatctcatgttcagccactacaacactttggatgacgagaagaagcgtgtcaaggagttccgcctatagacatgaaaaagtgctgacagctcctaaaagacaccactcacaatgacaagaggagcta

SEQ ID NO: 10995 - DNA, 393 bp, Triticum aestivum
  Clone ID: LIB31-028-Q1-E1-C5
tcggggttctatcctctaactcagggattgctcactttgtcaagatattccctggggtttctcatggatggaccgtgagatacaaaagcgaagacgcagctgctgtgaagagcgccgaggaagccctggcggacatgattgactggttcaacaagaacctcaagtgaacctaatgaattggcggccatccttttgtaataagccagtgtcactcttcaggagtcaccacgcgagcatccacggtttatgttatggtcttagctatagcctatagggcatgcgtctttgtctgctgcaggtctgctggtatgtgtgtgcttgctcattttggggtctgcttgtgctgaacactgaaactattgcactcagataaaatgtggtatttgcagtttt

SEQ ID NO: 10996 - DNA, 230 bp, Triticum aestivum
  Clone ID: LIB31-028-Q1-E1-C6
tggcagacatgacagtctggcacaccaatcagcacaagtacacgtacttaataggtagacatcgctttgtagaaccccactgacagtcttcatgaatcaacacacgatcatcaacagttgacgatatcgacgtatgcagatcccaaattgaaagcttcatcgaccgctgcaggactgctggaatgtctgagtctgctcaatgacgtgtctgcatatgctgaacactgagt

SEQ ID NO: 10997 - DNA, 443 bp, Triticum aestivum
  Clone ID: LIB31-028-Q1-E1-C7
ctcgcgggtcgacacgatacactatgatgagatcatagtaagttggtgtgaagaacattcgtgaatatgaagaaaagcaactgaaagatgctcaagcactgcaggagaggaagctaagtctgagcaatcaattatcgaaactgaaataccagctggaatatgaacaaaagagagatatgcatgctccgattgcaaagttaaacaacacacatgagaccctagagaaggagctgaagggcttgcaggagagagaaactcgtgctaaggctgatgctgaacatatttcaaatcagatggaagagctgaaggctgaggctgaagactggaagttgaagtcagatgaatgtgagacagcaattgaggaactaaagaaacagaatgatagtgttgctgctgcattggcaaagctggatcgccaagtgaagttaaaggaaggacagata

SEQ ID NO: 10998 - DNA, 200 bp, Triticum aestivum
  Clone ID: LIB31-028-Q1-E1-C8
ctaaattgagtcatagtacattcaatcaagagaatagctcatgtcatatgaacgtcatattacaagattatctcatgcttctaaatgcacgtgcgtactaggctcggctccagccatgtggatttcagtgcattccgtactcgtttaccctaaagtcatgcaacattatgacgatagagattgtggcattttcactaaga

SEQ ID NO: 10999 - DNA, 388 bp, Triticum aestivum
  Clone ID: LIB31-028-Q1-E1-D1
ggtccggaactagcgggtcgacttccaggagatacgatgacctaccaacactatcgattgacgggacacctcatccgctagcaagtggtatcagatttccaggttgctcagtgagattttacagtttttcgtacctgagattcagtctgttgatggtacctatattccaggagcaggcgatttacagaatgacggttagttcatcccacccgaaccaggctgagccttgcatagtcttttctgtacatgctgtgctgaactcgcggttgcaccgtcatgtgcacttgctggtcttaccgtctattcttttcaagtttcgagtcctgtgcaggagtagtcacgctgtcgccgcaccatcagtatctcccctgttagcgaccacaattgc

SEQ ID NO: 11000 - DNA, 444 bp, Triticum aestivum
  Clone ID: LIB31-028-Q1-E1-D10
ggtctagaactcacgggtcgacagggaaagtgactgtgaaattctcccaccatgatgttgcgggtccttcgagatgatgtgcggcaaacttcaccttttccgcacctgtgcatcctgtcatggtcaactcccttgctgtcttgcggagccaatcatctgctactatcggctcggtgctactggaaaacaccggtggatttagcctaagaaaacgggctaagtgatcaacaggtggtggtggtggtggtggtttgttgttgttgttcccctgattctgattctgggctagcaactacatcaatgtgttctgctgctggatcaactgggtgagctccggtgggaaggtaaatccggggtcacgtctcggaggcatctgaaggtttagaaaagatgagatttaagaatagagaggggtctagagagaaaacactacccatatgcaca

SEQ ID NO: 11001 - DNA, 395 bp, Triticum aestivum
  Clone ID: LIB31-028-Q1-E1-D4
agcccgctggagaggctcgggcttttcatgaagagagacatcgaagaagaggtcgaagatgaaatggaggacagcgtatcaccaccctccgtggatgtcgacagcgtatcaccaccctccgtggatgcccacagcatatcaccaccctccgtcgatgtcaacagcatattaccacccgctgtggatatggatattgacggggaggaaggagagatcggctgctgtgggtagcatttttttccttgtgatttgtttctcatacgtattgtgtaccaacacgatcgtacatcgtggttataaggttacgatgtgattctgccccgcaagcgggctatgtcgacataagcggagtgcactgtaactgttgtggtattcagagtgagtttctcgaatgt

SEQ ID NO: 11002 - DNA, 354 bp, Triticum aestivum
  Clone ID: LIB31-028-Q1-E1-D6
tcgcaggacgacacaacaccactataatgagtcgtagtaagtattaaatacgcagacgcatttagtatgcaatgttgaataattatttaagtgatttgttacagtacaacatgacaacgttttgcattggtttgtactgacctatctcacgagttcttgatgagtttgttgtgaatgaagcttttgagaagtagagaacccatgatatgacacgaattatggagacacacaagctcaagcttggggaatcccaagtcgccccaagataatatttcactaagtcgcaggcatcaaagcgtggggatgccccggtaagtatcccacctttcttcctcagcaactatcggttactac

SEQ ID NO: 11003 - DNA, 438 bp, Triticum aestivum
  Clone ID: LIB31-028-Q1-E1-D7
tcgtaggtcgacgctaaacgctaaactgattcatattattggaggcattgacaagcgtgtgatcgagaggttcgagaaggaagccgctgaaatgaacaagaggtctttcaagtacgcctgggtgcttgacaagctcaaggccgagcgtgagaggggtaacaccattgatattgccctctggaagttcgagaccaccaagtactactgcaccgtcattgatgcccctggtcaccgtgacttcatcaagaacatgatcaccggtacctcccaggctgactgtgctgttctcatcatcgactccaccactggtggttttgaggctggtatctccaaggatggccagacacgtgagcacgctctccttgctttcactcttggagtgaagcagatggtctgctgctgcaacaagatggacgccaccactcccaagtactcaaa

SEQ ID NO: 11004 - DNA, 303 bp, Triticum aestivum
  Clone ID: LIB31-028-Q1-E1-D8
gcgggtcgacgctacaccctaacgtgattcataggacttaagggaaggacctgcgtgttatcgattcgtacaagaatgaatacgttgatgaaatcatcaaggctttcatataccctctcttccttggggatcacagcgcatcacgttctaccgagtaatcgttaggtataaccctatgcttcttccatatcaccagattattatgaaccatcgttgacatcaatggacaccgttacttcagatggatcagcatcagcggcagtccatcatcagagtgtgctgtgcgcagcagagactccagtt

SEQ ID NO: 11005 - DNA, 408 bp, Triticum aestivum
  Clone ID: LIB31-028-Q1-E1-D9
ctcgtgggtcgacgagattgtcaacattgagtccttatatctacacaatatgttcccctttgagaggttcatgggagtcctaaagaaatatgtccgtaaccgtgctaggctagaaggaagcatctccatgggccatcaaaaagaggatgttatcgggttttatgttgacttcattcctggccttaagaagataggtctcccaaaatcgtggtatcaggggagactgactggaaaaggcactcttggaagtgactcaataatatgcagggacggatattcttggtctcaagcacactacacagttctacagaactctaccttggtgaccccgtatgtcgatgaacacaagaacagtctgcgctccaaacacccggagcagtgcgacgactggattacatgtgaacacat

SEQ ID NO: 11006 - DNA, 57 bp, Triticum aestivum
  Clone ID: LIB31-028-Q1-E1-E3
tatgttatccacaccataaatacgtcaaacactttcgcgtttcgcctaactgcaagt

SEQ ID NO: 11007 - DNA, 422 bp, Triticum aestivum
  Clone ID: LIB31-028-Q1-E1-E4
gggtcgaccctagccatcatggtaactcttatcacagtagtatcatatgtgggctttctttagttgcatctgctctgagtgctgcggcatcatctggagaaagggtcagtaccactattgtaggccttggggccgggagtttaccaatgtttcttcgtggatgcctccctcatcttgatattgaggttgttgagttggaccccgtgatggaggaggtcgcgacgaaatattttggcttttcaatggatgagcaattgaacgtgcatttgggggattgaatcaaattcattgaagaagatgcccattcgtaacgaaatggcaaagacagcgatgcagttacaattcctagtgttgatgttgattcatctgatctaagttctgggttgtcttgccccccagcaaactttgtcgaagatgctttc

SEQ ID NO: 11008 - DNA, 372 bp, Triticum aestivum
  Clone ID: LIB31-028-Q1-E1-E6
ctcgcaggacgacacgagaccctaaaatgggtcatagtacatcgatcaatacaccacagagcggtgtgccacgatggacatccagtatggattgtctgtgaaccgttgcacaggaccatagtttgcgtgaaaaatcatgcgcagaataggtgcgagatacgacatatggggatatcttccgagcaattctgacgcatcagggaatggcgcaccttaatatgccacagcttgtttactgtatgagaagcgcccaaacctttcctcaatgtctcaacaatgaccagtcaatgaaaatgagacggctgttttaaaataccagtctggaactaagtcggggccacaagatctggcaataacacctctaaacaattt

SEQ ID NO: 11009 - DNA, 434 bp, Triticum aestivum
  Clone ID: LIB31-028-Q1-E1-E7
ctcgcgggtcgacatcaatcactacaatgactcctaacacatcgaaagacgggacacctttgcctctatgatgaggacatgactaccttggatacgatcaaaaatattgcttacatgcatatttgtcaggtgatttctagtgcaaactactcaataatctatttatgttatccagaacaaaaatacttcacacacttttgtgttttgtctaattgcaggtgtatgggatatttgtacaatccacatatgaagataaggcaaaaggagaagtttaggttctgttcaaaaagtcctctcacgtaacttttgggccaagagaagatagagtccaagtctctcacgttctggattcagattcggactgcacagacatacctgactcaaaacgccaacaactttttcatacggactccgaattgggtgattcctttttg

SEQ ID NO: 11010 - DNA, 264 bp, Triticum aestivum
  Clone ID: LIB31-028-Q1-E1-E8
gggtcgacgtactcctttcaggcctgaggagatggacatggggactattgctatcgcgtccagatacgctctcccagtgagagccgcactgccgtgaagtagttctcactaaccaatgtaagcctttgagacagtagtttagcaatgtatccacgccaactttcctaacagctagacagatacgctgttcatttgggtcccgtacatcaagatgtccagtgcactcaagacggcatcgtaacgcatcatcagtttacaagtgat

SEQ ID NO: 11011 - DNA, 424 bp, Triticum aestivum
  Clone ID: LIB31-028-Q1-E1-F1
gggggccgccttttttttttttttttttttttttttttaggaataaataatccatctactttctgtttagatgtggttttatgttttaattagtgtttgtgccaagtagaacctgtaggatgagctatgatgatagttgatttgattctgctgaaaaacagaaactttgctctcacgagaaaaaattcaataaatcacaggaacgtgcttatgcattgattcgttttgatgctgatcaataaacaaaatttcgagtacgtcctaatttggtagaatttttagagttccagaagtttgtgttagttacatattgctacagactattctgtttttgacatattctgtttttcgtgggttgtttgcttatttcaatgcatctatggctaataaattagtttataaaccataaggaagttggaataca

SEQ ID NO: 11012 - DNA, 115 bp, Triticum aestivum
  Clone ID: LIB31-028-Q1-E1-F11
tcataggacgacgctatgccctaaaatcagtcgtattaatcatactacgcaacactgaaccgtcacgtacactatatggatataaacgaatgatcatcaacggggtcatccataa

SEQ ID NO: 11013 - DNA, 361 bp, Triticum aestivum
  Clone ID: LIB31-028-Q1-E1-F2
catatcatgataacagggatgtgaacttcacatatacgactcagaaggagaagatcaaggaaatcaacaggaaggatgacatattctacagcagtatgttctcgaggatgaccaagccttcatcagaagaaagcaaagcttgatgcgcaacagtacccaaaggaaggataggactcgcggattgctctcacggaagggccatcgtgtctgctcagctctatgggctgggtataccacgcatgtgggtggagttgctaaagtttcgagagatttcagttttgaggttgccctacaatatattttcttgtcaaaaaaaactgatgtttagagcgttgcatactaaagtcattgcattccggga

SEQ ID NO: 11014 - DNA, 437 bp, Triticum aestivum
  Clone ID: LIB31-028-Q1-E1-F5
cgcgggtcgaccttgaacctttgtgctcatgcccatggacctgatgacagacttatcatggaagctgctcataaaaatatttatttctttggtataagctcatcttgtatctatgaattggtcctttgcaaccgtggctctgaccatgattgttcccatttgattccatttctcggacaagttaaagcacttgtcttctacagaacaatgcatctcctcaacctctattttgatattccttcgagtattacccctggtatctcgaggatatcatgccattgcactacatcttatgaacttttgatgaagcactacctttccctgtcattgtcacttcacgggttctgtcttgtttatcaatcgagagcaccgataagtgaatcgattccacagtccgattcaataactccaagtaagttttgttgcctatgagttta

SEQ ID NO: 11015 - DNA, 422 bp, Triticum aestivum
  Clone ID: LIB31-028-Q1-E1-F6
ctcgcgggtcgacatcaaaccatatgcgcatgtcaagcaggcgatgaatgagatcaatgcagctgcaaggatgagggtggctgcaaacgataaggcggaagctgagaagattgtccagatcaggcgtgccgatggtgaagcagaggccaagtacctgtctggcctcggtatcgcccgccagcgccaggccattgtggatggcctgagggacagcgtcctgagcttctcagtcaatgtgcctggcaccactgcaaatgacgtgatggacatggtgctgatcacccagtactttgatactatgaaagagattggcgcgtcctccaagtcctctgcggtgttcatcccccatggccctggtgcggtgcgcgacatcgccacgcagatccgtgacggtcttcttcaaggccagtctgcctctgaca

SEQ ID NO: 11016 - DNA, 393 bp, Triticum aestivum
  Clone ID: LIB31-028-Q1-E1-F7
tcgtaggtcgacacgacaccctaaaatgagtcgtaggagaccatggaaaggtgtccaaggacaacgaggagcaggcagagttcaagaagatgtttgatcgtattgaacagtacaacctgattggtcacatccgctggatctctgctcagatgaaccgtgttcgcaatggtgagctctaccgctacatctgcgacatgaagggagcctttgtgcagcctgctttctatgacgctttcggtcttaccgtgatagaggccatgacatgtggccttccaacattcgccactgcatatggtggtccagctgagatcattgtcaacggcgtgtccggctaccacatcgatccttaccataatgacaaggcctccgcactgctcgtggacttctttggga

SEQ ID NO: 11017 - DNA, 434 bp, Triticum aestivum
  Clone ID: LIB31-028-Q1-E1-F8
tcgcgggtcgacagtaatccctaaaatgagtcatagtaatgtcgaccatcctattgacgatcttataattcatctgctaactgacatattttaaccatataatttctggtgactggaaatctaaaactgaagatagggcagattgttttgattatgattacttggagatctcgtggcttgctgtccatggatcagtcatacctacggcaacatcaactcattgattctagaggccatggttctcgaggtgaactctgaatcgctgatgcaattgcagtggaggctagagcctgccaagtgatgcagtagatcaaaccatataatgcaactgacttctcacatgacttatttcctcctgtaaaacttctttctcatccatgtaatctctgcacatctcaaatctccgtccgccttaaccttgattttggcacata

SEQ ID NO: 11018 - DNA, 286 bp, Triticum aestivum
  Clone ID: LIB31-028-Q1-E1-G10
caatactctataatgagtcctatcattcggcttcacccagtccgaggtacacatccggctgacccggcagtaacaatcgcagaggtgctccccttatgccctagccgaattaacgggaacgtatggcataaatacaagagctaggcaacccatcttggccaaaacttaagtcatatcgatgcatataatggcgaagaaaatgtacatgcggaggaataacacatgtgcggggcatgaagcccagatagataattaagcttctgtgtaagaagcccccaggtacaat

SEQ ID NO: 11019 - DNA, 425 bp, Triticum aestivum
  Clone ID: LIB31-028-Q1-E1-G11
ctcgtgggtcgacgccatccactagactgagtcgtagtaggtgctgtacggcaaccacgagatcacggtcggatccgagctgaggccgtcgcaggtggcgaaccagcccacggtgcacatcacaggaagagcgggatcattctacacgctcgtgagtgctccattcttaagttgtatcattgattgcatatatcaatatcagaatttgcaattgctaacaccaaggagtggtctttagtggtctactgatacggaccttcttaatttgttactacgtgatggtagacccagatgtgcctaggccaagcgacccttgcgaacgggagtacctccattggtatgtgctaaattaagatagctttaccttagccacttcccttacgcgtgcactttgtgggcgaattaaccttctcaaaataacatgt

SEQ ID NO: 11020 - DNA, 415 bp, Triticum aestivum
  Clone ID: LIB31-028-Q1-E1-G4
gggtcgacagagctcggtatctctctctctctcactctatgtgtgtgtgtgtgtacatgcgtactcgaggtgagtcgtgaataatatcgcagggcaagatggcctctacgtcgtacaccatgaagaatagtgtgtatccggtcgtgcgattgggcatggtacgcagcccctagagtacggagtcgagctcctcgacccagtgtttatctgagtcctttaaggatcgcactagtctaggtttaatgctactcattatcaagctgttatcccattcgacttgaccatttgtttgagggtgatagacgggggcataatcaagcttgatgcccagattagcacaccaagtttttacctcatcagctgtgaagttagagccattatcggtaatgatgctgtgtgggacaccgtaatggtg

SEQ ID NO: 11021 - DNA, 199 bp, Triticum aestivum
  Clone ID: LIB31-028-Q1-E1-G5
tcgcgggtcgacaactatacatcaggtggtcccatacgggacgtggggtgtttgcttctgtatttcttccatttacgttttgttgtccgcacgccaacctgtatggtagatctatcttcagcattgttgtgggtactgtgatttgcttccagtgatttagccgtgtagcagcagaatgtcgttacgctttcctttcatc

SEQ ID NO: 11022 - DNA, 440 bp, Triticum aestivum
  Clone ID: LIB31-028-Q1-E1-G6
ctcgcgggtcgacgacatcccccagactaaatcttaggatggtctcctcagttagctcacggctcatcttcgcactgagttcgccatcaaggacttgggtcctttgcactacttcctcggtgttgaggtggtgcgccgtctacatggcttcttcctacatcagcggaagtacgctcatgagctcttggagcacgccggcatgcttaactgcaagcccgccgctacgcctgttgatatgaaggccaagctttctgccacgaatggttctcctgcttcggatgctgttttctatcggtctatcattggtgctctccagtacctcactctgactcgactggagatctagtacgccgtgaagcatgtgtgtcttcatatgcatgctcctcgagacgttcactgggctgccgtcaagcgggttctccgctatatctgtggcacta

SEQ ID NO: 11023 - DNA, 430 bp, Triticum aestivum
  Clone ID: LIB31-028-Q1-E1-G9
ctcatgggtcgacgacaatctctaaagtgaatcgtgtgacagatctcagtatacagctctatgcagaacgcattttcaaatatgccgagtgcagtccatcttgctttgtgttggcacttgtctacatggagagatatctacagcagccaaatgtgtacatgacgctcttcagcgttcatcgcttgctaattacaagtgtggtggttgctgccaaattcacagatgatgcgtttttcaacaatgcattctatgccagagtgggaggaatcagcacaatcgagatgaatcggcttgaactggatttgttgtttaatctggacttcaggctgaaagtgaacctacggacattccgggagctactgcctgcacctggagaaacatgcaccggtgttcacagagaaactggctgttcaggttcattgtgtccgtg

SEQ ID NO: 11024 - DNA, 428 bp, Triticum aestivum
  Clone ID: LIB31-028-Q1-E1-H11
ctcgtgggtcgacgcaaatcactaaagggagtcgtagcaagaagaccacagaaggggggacagcttgcaaggaggggacgcacgtctggaccatcccgcgagccatggcggcattgttcgacaagatcgagaagctgaagaatcaagtggacttccagctacgcgtttctttcatcgagatcctgaaagaagaggtgcgggatttgcttgaccctgctactgttactgctggcaaagttgagaatggcaatgggcacaccgggaagttatccgtgcccgggaaacctccggtgcagattcgggaggggtcaaacggggtcataaccctgtcggggtcgactatgaaggcatcggtggcgactttgtcaatcttcggatgaagtgccgggtcagtcgtccggatgtgcttatagggatagggggtgcgt

SEQ ID NO: 11025 - DNA, 394 bp, Triticum aestivum
  Clone ID: LIB31-029-Q1-E1-A10
ctggtccgcatccacgcgctgctcggtgtcaccaggtcaccggcacaactcttcatgcccaggtcgttcaacattttcttctgcttttggtgcagtcacatttagagtgtttgtttcccattttactgtgttttcatggtaagatgttaggttggatttgaaggttcatatacttggctccaaagcatcaatctcttgtagaaattagaactgagggccttttaaaatgagtcctgcataatagtgttgttcagtgggatgcagaatttttgtttgtactgatttacgtactgatttcatcatcatatgactacaatgaagaagctgtgtgtataaatattactaacggatgatactttgcatcagtgattttacaccagacggttcagggaaa

SEQ ID NO: 11026 - DNA, 369 bp, Triticum aestivum
  Clone ID: LIB31-029-Q1-E1-A3
tgactttccatgatactattacacgcatgctccacaactaatatagaagatgcatttccatcccatctagtaggtgctgactcgatgcaaacaaattaaataaaattagtaggtgttgactgctcacacaccatatatgttgaacgatgctagctgatgtaccaatgtgatgttgcttgcttgattgatgactggttgtcattaactagaaaaaagaataagaaaaccttgtcaatttatttgaggagaatccttatcccattcattagacaaccattactactacttgtatttgcatgtttgcttgcttgcttgcttgtagcactatcaagtgtggggaaatccagtactaggatgtgtggaactggg

SEQ ID NO: 11027 - DNA, 407 bp, Triticum aestivum
  unsure at all n locations
  Clone ID: LIB31-029-Q1-E1-A4
gggtccaggctccttgcgaagaagactgcagacaaacgcattttccttgcagttttagttgctacgcaagatcgaacggtcgctgtcagtgtcaaaaccggcggatctcgggtagggtgtcctgaactgtgcgtctaaggcggatggtaacaggaggcatgggacacaatgtttacccaggtttgggccctcttgatggaggtaataccctacgtcctgcttgattgttcttgatgatatgatattacaagagttgatctaccacgagatcaaagaggctaaaccctacaagctagcctatggtatgattgtatgttgtcctacgaactaaaaccctcaggtttatatanacaccgganggggctagggttacacatggtcggttacagaggatgagatatacatat

SEQ ID NO: 11028 - DNA, 366 bp, Triticum aestivum
  Clone ID: LIB31-029-Q1-E1-A5
atgggtcctgcggttgacagccccacagtatcttcattgttgtgattccggtaggcggacctatttttcctgattcaccgcggcttgattgttgaataaggagcttagttagttagtactgtaagaagctcttgctaagagctgagggcaggagaaaaaagagaagggggtggctgttgaaaatgactttttaagcagtccagtacctcctctttggcccatttctaatattatctcaaatgttgttgttgctgatactgtgttcagtgtggctggttggtgctgcgacaaactgtgttatatatatacatcataaattgtgttcaagaaataaagcaggtatggttggatggttgggatcgtact

SEQ ID NO: 11029 - DNA, 393 bp, Triticum aestivum
  Clone ID: LIB31-029-Q1-E1-A6
ttcgcgcgtcgaccgaagaagagcgaggagacgtacaagatctacatcttcaaggtgctgaagcaggtgcaccccgacatcggcatctcctccaaggccatgtccatcatgaactccttcatcaacgacatctttgagaagctcgccggcgagtccgccaagctcgcccgctacaacaagaagcccaccatcacgtccagggagatccagacctccgtccgcctcgtcctccccggcgagctcgccaagcacgccgtctctgagggcaccaatgctgtcaccaagttcacctccgcttagatagtatgttccctgttgtccaagtggatcgatgtttgctctgtaagtagctgttcgtaccatgtcatcttataagttgtgtgggaacacaca

SEQ ID NO: 11030 - DNA, 422 bp, Triticum aestivum
  Clone ID: LIB31-029-Q1-E1-A7
cgcatgatccacaactaatatacatgatgcatttcgatcccatcgagtaggtgctgacacgatgcacgcacattaaataaaattactatgtgttgactgctcacacaccatatatgttgaacgatgctatctgatgtaccaatgtgatgttgcttgcttgattgatgactggttgtcattaactagaaaaaagaataagaaaaccttgtcaatttatttgaggagaatccttatcccattcattagacaaccattactactacttgtatttgcatgtttgcttgcatgcttgcttgtagcactatcaagtgtggggaaatccactactaagatgtgtggagctgggacgctgttggatcattaacacttgtagcactaacaagtttgtactgattgcagatagaaaaccctgtgattttttc

SEQ ID NO: 11031 - DNA, 244 bp, Triticum aestivum
  Clone ID: LIB31-029-Q1-E1-A8
tcacatcgaaagatcgggaccctcgcctctatcaagtggtatcacatttccaggttgctcggtgagattttacagtttttcgtgacttagatcgagtctgttctgcagaccgatacatcgacgaaagggacacactgtattagggtgattgcaccctcttgaaggcagtctgagcctagcatcagcttgactgtacttgctgagatgaaattgcagtagcagctccatcaccagatgctggtcg

SEQ ID NO: 11032 - DNA, 391 bp, Triticum aestivum
  Clone ID: LIB31-029-Q1-E1-A9
tgagtcgtataagcattggtatttctgaagactttcatgaagactttgaaagtgaagatattggtgtgtccgtgacgacttgatattcatgacaggaatatcaagcttgaagactttcgttttcatagttttgtttttctctttcttgagtcagatgaaacaccgtactgttaaagggggtcaaggaaatactaaggaaaaatttccatgtgatgctcaactcaaaatcctacgtctaccaatcccttcgagtgaagccattggaaatctcatacagttcagtcaatttcatcagtgatagagacgaagttcttctggtctctgaggaatttgtcctgactgacgagttacgaattcgccagtgcggattgcctacaaagttacgaacatg

SEQ ID NO: 11033 - DNA, 392 bp, Triticum aestivum
  Clone ID: LIB31-029-Q1-E1-B1
gggtcgacggtctgtatgacttaacaaaaaatgaagatctttggagaatggtttgccgtaatgcatggggtagtgagactactcgagctcttgagacagtgcctgctgcgaaaagattgggctggggtcggctggccagagaactaaccaccctggaagctgttgcctggaggaaattgactgttggaggtgcagtggagccatctcgatgcaacttcagtgcttgtgctgtagggaatcgtgtcgttctctttggcggggaaggtgttaacatgcaaccgatgaatgacacgtttgtgttggatttgaatgctagcaatccggagtggagacatgtcaatgtaagctcagctcctccgggccgctggggccatacactatcgtgcctaaat

SEQ ID NO: 11034 - DNA, 450 bp, Triticum aestivum
  Clone ID: LIB31-029-Q1-E1-B10
tgacggtcctaaattcacgggtccacggtgcattgctgacggaccatcttctctcatcaagcgaggatgatgatgatgccgaggacctgagctgttgcttgatcatctattgttgctggattctttcaaccctcttggtttggaaatccttggctgtccagtagaacaaaatgcttgtagattttgtagggatggtgtgtattgcagtatttagcatttagcttaacaaaatgcttgtagattttgtagggatacttgatttgtgggatacttgatcttgcaactgtgacttgactaatagagtagaaaatatcttattaacgaggagagacaggcagcagcacgacgaggattaagggaagtagcagcagtagcatgactctgcatagaagtggtttcgaaaaagctcgaacagcaatgagcttgttttatttgctgataaggctatat

SEQ ID NO: 11035 - DNA, 432 bp, Triticum aestivum
  Clone ID: LIB31-029-Q1-E1-B11
gggtccacgataatcgcgaaattgagtctgctcatgatatggtcaggtgccagatgaacttcaagcgtctttcgctgaccgacatcaagattgacatcaagcgtatccctaagaaggcaactttgatcaaggccatggaggaagcagatgtgaaaaccaaatgggagaacagctcatggggtaagaagcttgttgtccagaagagaagagcatcgctgaatgactttgacaggttcaaggtcatgttggctaagattaagaggggtggtgctatcaggcaagagcttgccaagctcaaggaggttgctgcttagaatatcctagtggatggcatgttgagttttttgttccaagttggatctgctctatgttccagtgttcttaaagccagaattagtacaactgttttcagcgaactatttcatattttgt

SEQ ID NO: 11036 - DNA, 394 bp, Triticum aestivum
  Clone ID: LIB31-029-Q1-E1-B12
atatgagtcgtataatcgaagcatcgggaccctcgcctctatcaagtggtatcagagccaggttgctcggtgagaatttccagttttcctagattagatttattttcttacctattgtccaggaaaaagccacaaataagagttagatctagtcatccttggtccaagccagtctgagcctttgcaattttcttttcattgcttgcatagttgaattatcggttgcatcgtcgtgtcaagttgctagtcttagtgtctagttcgtttagagtttcgagttctattcacattagtcacgcgaccgctgcatcattatctcttctgctgtccaacacgcatccatcaatttccaccacgtgctacccaccattcattgtcataacaatagttgaga

SEQ ID NO: 11037 - DNA, 432 bp, Triticum aestivum
  unsure at all n locations
  Clone ID: LIB31-029-Q1-E1-B2
cgggtccacttatacctcgagaagtgtacgtcgaatgacatcacctataactgattttgcccgttttgcctccctggttagtgggttctaatttctcccgctctgggcctttctttatctgtttttttatgtctgagttgtttgtttgtttgtatttttaccaaaagggaaaagaaactacacatgaagcccatctgtaccaaataaaatgacgagaaatcctttcgttccttgtttcttctacattcttcttctttttgtcagaatgagcctcaattaaaaaaattgcacgcacaagtcggcttggtctatgtgtgtgcgcattttggttagatttgggttcaattggtgaaacaatcagctccgttcatcagttataacanaaacataggttctcggaacccgacggcggctacttaanaaaccgatcac

SEQ ID NO: 11038 - DNA, 413 bp, Triticum aestivum
  Clone ID: LIB31-029-Q1-E1-B3
ggctaatcctacatgatgcccgcatgcgtcaatatagttgaagcttcgctgaagactccaacagacaggccggcccacttaatggttattcagcttcatatctttttcttttttagtattttgttttcagatcttggtttttcttcgagtttgtttgcacacttttttatacgttttgcaataagcggtaaacaatttttcagtcacacattgaattcatttattatacaatgattttttaatagacgctcaacatttatttataatatacaatgaacaattttgttatatgcactgaacagtttaaatatacaacgaactttttaaattacatgattttaatatacaatataaaattataatataaaatgaacttttttataaaacaaataccaaattttttctaaagtata

SEQ ID NO: 11039 - DNA, 408 bp, Triticum aestivum
  Clone ID: LIB31-029-Q1-E1-B4
gggtccacgaatctttggatatggtgattcatgaaacccatggtatgatgtgtaaacacagccccccctcgcgaatggaagttgcatagcacaataatcatcgccggtgatatgatcgatgattggttggatgatcggataattgagcgcgaggaacaaggagtggttgccaaggctgtaaacccgcctccagttgaatacgcctggcccaacgaagctaggatctttctcgaacacaaagcatccatagccatcaatgtcacaaacgccccatgcattgtactgcatctggtttgatgcaatggtttggtcaatttggtacgtgcgaatgagcatgaaatgaccgccgtcagctgaacaagcgataaaacacaacccatcggctggtatgattccaggtcctggaat

SEQ ID NO: 11040 - DNA, 427 bp, Triticum aestivum
  Clone ID: LIB31-029-Q1-E1-B5
cataacaccctaaagagagtcatatcatccatgctacacacattataggcggttcccaaacagaatggtaaagtttatactccccctccaccaaaaagcatcaatccatggcttgctcgaaacaacgagtggctccaactaacaagagtcccatggggagttttgtttgcaattattttgatttagtttgcataaagcatgggactgggcatcccggtgaccagccatttttctcgtgaatgaggagcggagtccactcctcttgagaataacccgcctaacatggaagatacagacagccctagttgatacatgagctattcgagcatacaaaataggatatttatttgaaggtttagagtttggcacatacaaatttacttggaacgacgggtagataccgtatttaggtaggtatagtggactc

SEQ ID NO: 11041 - DNA, 361 bp, Triticum aestivum
  Clone ID: LIB31-029-Q1-E1-B9
gggtccacgccatacactaaattgagtcgttgtatgggatagcttgggattcggaattcagcagctcttacctcaaaagttcacatgaccgacttacacgttcatttcgaacacttcggcacgaccgcacaagcgccattggataatgccaatcgtgagagcatgatcactcaggttcgcagctgccaacagtctatcatgtcactgccactgtctgctacgtgatcactcatctcgcacgcagtcgcgtcgacggctctgctgatagtgtcatggatgacagcccgtactctaattgtaacgatgacttcagtaatttgcgagcaggtaattatgcggataacactagtcaggtgaccac

SEQ ID NO: 11042 - DNA, 385 bp, Triticum aestivum
  Clone ID: LIB31-029-Q1-E1-C1
gggtccagtttgacgatctgactaagaacgtgcgaggacgtcgcgccttaacaatcgctaaaccaactccgagaggttattgaccacgccggagcatgatcaacctgaccacgagggtctgtttcctgcaagcaaacgaagaacaagcaagaaactaagattgcaatctagatattgcgaatataagatgaaagctttattgatcaaggtgtggttctgtgacgcctttgtctggtcgttgaacacaaacgaagtacgcgaaatttatgaagtggcatcttgtatattttgtccaaggcttcatgcacccattatggtggcttcaaagcccctactgctacatatacgggaccaattactagagtccagtaattgttgcattgtt

SEQ ID NO: 11043 - DNA, 400 bp, Triticum aestivum
  unsure at all n locations
  Clone ID: LIB31-029-Q1-E1-C10
gggtccacgctactcactataatcagtgttgatacatcagtacagttcttaagatggagcggtgacatttggcgacggcggcctctgaaagcacaccggaccagtgtgtgccccaaacccgcaagtggctaggttggggtctcaagtcttagatgttaggcttggctgcgaggtctgtgttattaggcccggactatcagcatcccttcatcaactggatangagtagcgatagatgttgcctagacggtggcttcagacttactgttgtatttctttgtaaggacttttgtgaataattaataaaatggctgcatgcatcgtccaaatgcagaggccgggggtcttcctccatttctaaaaaaaaaaaaaaataaaaaaaaaaaaaaagcggccgctct

SEQ ID NO: 11044 - DNA, 412 bp, Triticum aestivum
  Clone ID: LIB31-029-Q1-E1-C3
gtaagcacgacgacacgcaggcgcgggccatggcgtggaacgcggcgtgttcctcgtcccggccggccgtgctgctcgtccccaagggcaagacctacctgctcaagtccatcaccctctctggcccgtgcagatccagcatcgtcttcaaggtgaagggcacgctcatcgctcctccgagcatgtcggcgtggaccgacaacgataggaggcgctggatcttcctccagcgcatcaccggcctcaccgtcaatggtggcggcaccatcaccggcaacggtgagatctggtggaacaactcgtgcaagaccaacaaggctctgccgtgcaatggggctcccacggccctcacgtttcacctctgcaacaatctaaaggtggagaacctgaaacttggtaacagccaacaaat

SEQ ID NO: 11045 - DNA, 445 bp, Triticum aestivum
  Clone ID: LIB31-029-Q1-E1-C5
tattcgctaaaatgagtcatagtaaggaatgcagagaggacaagcaaggcatccaataattgaccgactgatatgtatggattagactatctggattttttttggtgttattattattataagtgagtgtagtactttgtttgaggagatagaagacaaggtggacaaatcatgcgtgctccggcctgaatatcttatcgcatgttcgcacaccaaatgactcagcatttttttatatatttttcgcaatgaaccaaagaatcagcatcagttatggagacacttctagaaaattataagcacgatgttatagaaaccggacgctctctcgcattggatagaggctaggcgagagtcaacttgtaggagctgatattcaaatacacccacacgtccgtccaactagtatatacaagctgaatatactttgtccccttcgaagaaa

SEQ ID NO: 11046 - DNA, 446 bp, Triticum aestivum
  Clone ID: LIB31-029-Q1-E1-C6
cgcgggtcgacgcagagctatatactttggctgaatatgatcctttccatggttatgaaactgaaactgttgtggcacatcttactaagttgaatgatatagccacccttttttactcatgataagaaaactcgctattactttatctaaaattatttcctttctcattaatgggtgatgctaaagcttggtacaatactcttactcctggttgtgtgcgtagtccccgggatgtgatttattacttctctaaaaaatagtttcctgctcataagaaacaagcttccttgcatgaaatatttaactttgttcagactaaagaagagagtctcccacaagcttgggggaaggctccgcagttacttaatgctttgcctgatcatcctcttaggaaaaatgaaatacttgataccttctataatggactaaccgatgcttctaggtac

SEQ ID NO: 11047 - DNA, 441 bp, Triticum aestivum
  Clone ID: LIB31-029-Q1-E1-C7
tccacaactaccgcgcaagtggtgcctgaaagcacgacgacacgcaggcgctggccagggcgtggaacgcggcgtgttcctcgtcccggccggccgtgctgctcgtccccaagggcaagacctacctgctcaagtccatcaccctctctggcccgtgcagatccagcatcgtcttcaaggtgaagggcacgctcatcgctcctccgagcatgtcggcgtggaccgacaacgataggaggcgctggatcttcctccagcgcatcaccggcctcaccgtcaatggtggcggcaccatcagcggcaacggtgagatctggtggaacaactcgtgcaagaccaacaaggctctgccgtgcaagggggctcccacggccctcacgtttcacctctgcaacaatctaaaggtggagaacctgaaacttgtaaacagccaacaaatcc

SEQ ID NO: 11048 - DNA, 432 bp, Triticum aestivum
  Clone ID: LIB31-029-Q1-E1-C9
gtataccctaaagtgagacgaaataagagttttcctttttttattatctgtcaatgaatattctaatgggaatggaatttcataatactgaaagagaagagctagcaattcggaacgcaaattgcgttttaatacgtctcactattctaattttttagaagaaatggcctttattatttcttttttatggggttaataaatattaatcaaatttaatttaagaaatgagagaattcagaatagctacgagaaagactagtccaatccataatgatgtaccagaaaatacaacatttttattatttgaccaaccatcaggagaagcaaatacaaggggtacactaattacgaagactgaggaagtcgcaattaatgcaaaaacagctaatttggaaggcataatcaaaattccaaaccctcaaagctaccatc

SEQ ID NO: 11049 - DNA, 431 bp, Triticum aestivum
  Clone ID: LIB31-029-Q1-E1-D12
gtccacgcaagacgctaaagtgagtcgtactagacatgtataacaaatatatttcaaccaacaaaatcaccactcaatataccttaccatgccataccggacgtaaccgtcccgacggtgaccggcgataagctcacgcctacccaaggcagaggcttttcacggatttctttccggtatgcatgcaaggcacatgatgatgattaccatcaccagtatactcatttccaacagcaaggaaatcactaatatgcattcatgcaaatgatcatatcacaatgacaataacaagttctcccgatataaagtggtgttacaaacgtttcaaccaacacatcaaaaatattattccgttgttcagaatgcattcctttaacggtgttgaaaagtgggggtgacccccaatatttccgaaagcttccttctccccc

SEQ ID NO: 11050 - DNA, 404 bp, Triticum aestivum
  unsure at all n locations
  Clone ID: LIB31-029-Q1-E1-D2
cgggtccacacgatgatatcaactgccactacatctgacccagaggtgaaatcgcttctgagcagcaccgccgatgtctggatgcccgtcatcaccgcgtctgctgatgaaaggcgggggtttgccgaaacaagcggtgacaaggaagagcaagagaaatctaagtaaatagcttggactgaagcccttgtactcctttgtgccagccttgttctgcattttccttgcatgagtatatgttcatacctgtgtgtatcaagtgttcttttgggcaataacagaaaatanaanacatgttgttcatgtacttgctattctaatttgtgtgatggttgaggtaataaaagtctgccaagcattgtgtcaaaaaaaaaaaaaaaaaataaaaaaaaaaaaagcggccg

SEQ ID NO: 11051 - DNA, 443 bp, Triticum aestivum
  Clone ID: LIB31-029-Q1-E1-D3
ggggccacataattcgctaaagggagtcgtattaacatctagcagcatggcagcagaccagttttttttcttttcctgcatgtgtttttcttttcgtttttactttctttagtatggatctatctctctgatcaagcaagaagagatcggcagctccagcgacatgacgagccgtttccgggtttttatgaacggaactatttggggtctcgcggaagcaaaactagctagggtttattagtgctgctctagttccgcttgctattcctttcgcttgttcgtttgtttctttaaggattttattatcaacgttgtaaggctggggatgtgcagctagcttcagattcaagcctgccgtctcgcctgcttgtacattggtaaacagaaccgctggtctccagtgaatgaatgattataagcagctactggtatggtattttggg

SEQ ID NO: 11052 - DNA, 182 bp, Triticum aestivum
  unsure at all n locations
  Clone ID: LIB31-029-Q1-E1-D4
ggggccacgccgtcgattcgacggaggccggcgtttccggggcctgaatggaattgaacaattgaagccccaaggaccgctccatggatccataggtatgcaaattgcacgcacggagtgttgattgtatttgcagattatgtgtgtaatttactcaatgaganaaaatagcgtgctacaac

SEQ ID NO: 11053 - DNA, 423 bp, Triticum aestivum
  Clone ID: LIB31-029-Q1-E1-D8
tcgcgggtcgacaccttccacaaacgtgacacgatctagggcagcgctggggaccggcaagtcgcgagttcttacctcgaaggcgtcattctggcaaaccaagataaggataacttcctcgtgccttactttcccgagtaagtcctcccctcaactggcccgtaacatatgaattcttacatttcgatcgtttttcttttaacattccatgttttctgcagtgacacacgttgcacgctcatcctcctaagccccaaatattccatggccacatatttcgacccggaccgtcagtcgaacgtagactacacaaatgtcaagaaggttcttgatgatgtcctccccggctacgccaaatctggaggcaccttcactaggcctatttgtaagtacggcaagcacgtgttctcccacaatacgacg

SEQ ID NO: 11054 - DNA, 389 bp, Triticum aestivum
  Clone ID: LIB31-029-Q1-E1-E1
ccgggtcgagaccgtgggctctgaagaaaatgctggggcatctccagctcaaatacaagaaccctgtagtcatgatccatgagaacggagctgctagcatcgcggatccttctgctgggaacgcccccgacgacgagttcaggtcgcagtacctgcaggactacatcgaggcgaccctcgaatccagcaggaacgggtccaacgtgcagggctacttcgtgtggtcattcctggacatgttcgagtatatattcggctatcgcatgggttttggcctctatggtgtggacttcaactctgaggagaggacgaggtaccagaggcactccgccaagtggttcaccggcttcctccgtggcggcgacctcaggccggtggctctgcccggc

SEQ ID NO: 11055 - DNA, 397 bp, Triticum aestivum
  unsure at all n locations
  Clone ID: LIB31-029-Q1-E1-E10
cgggtccacaacttacagcaaatgtgaacgatgcagaaatagtttcagtatgccatgcaggcaaagaaaaccaagtcaattcattgcaaaacatgttggctgcaccatcgtcgagttttccagtcaatggccattcttctaatggcagtactgaaaaaactgatatgacatgcctctttggtcccaaaacaaaaactgaaagactcgagtatttaaccccagtgtcaaagcacagaagcttacccagctgtagcaatgatcggaccagtcagcacagcttttctttctcgaaaggacatggtttagagagaaaganaatcaagccgctatggacttcaacanaaccaactgcagctgatgtcagtgacaatttccngactaaaataattgcgagata

SEQ ID NO: 11056 - DNA, 439 bp, Triticum aestivum
  Clone ID: LIB31-029-Q1-E1-E11
gtccacgttacacactatactgagtcgtagtaacctggaaacttgtccacttccaaggtcaggcccgtggacttggagcccgccatggtcgggtcctgcactttcacgatcagcagcttctccaagcttaaggcgacgctgcggagcttcgagtgcgcctactccaaacccttcagcataggcgggatagcatggttcctcaagctctaccccaatgggtaccagcgcgacgaggaacgcgtgtccctgtcgctagtccgtgaacgttacaaccaaccggcaacgactgcccagttcaactttgagtttgaggggatcgccaattatgagtctagtaagataacacacattttcaatcgtggcaactacgaagtcgaatataagctgccgccgctcagcacttctgcaaaacatgaccctctcatcatccaatgttgtc

SEQ ID NO: 11057 - DNA, 296 bp, Triticum aestivum
  Clone ID: LIB31-029-Q1-E1-E2
ttaaggacgtcgcgccttagcaatcgctaaaccaactccgaaaggttattgaccgcgccggagcatgatcaacctgaccacgaaggtctgtttcctgcaggcaaacgaagaatgagcaagaaactaagattgcaatctggatattgcgaatataagaggaaagctttattgatcaaggtggggttctgtgacgcctttgtctggtcgttgaacacaaacgaagtacgcgaagttgcagctatggcgaactttaatctaaacaaaacccaaagtctaaacgatgtcctaagggttgt

SEQ ID NO: 11058 - DNA, 395 bp, Triticum aestivum
  Clone ID: LIB31-029-Q1-E1-E3
cgggtcgacactatgacagaaagtgactcgtcataatcgggaagcataggtcctattcatcatccagtacgtaaatgacaccagatcgaatttatgaactgtgactgccatcacagtgtataagtatgactaagaggaaatttcagtcagttttcctatcatcagactgcccattaatacttaccaaaattctcatgtgatagaatcaacaagtcaacatgtgcattttcaaataattagctcacccaaaacccaacaacctatgttctcagccaccaaacaagtgcaactcaacgttatacactatagtttacgtgacagctcaagatacatcaaccactcatatagtcctctaagactgctaacaggcactacgtttacatgatcatgacatt

SEQ ID NO: 11059 - DNA, 445 bp, Triticum aestivum
  Clone ID: LIB31-029-Q1-E1-E5
gggtcgactgccaccaaagcgatatccatcatctcatcgaaagacgggacacctttgcctttatcaagtggtatcagatttccaagttgctcggtgagattttacagtttttcgtagtttagatcgagtctgttcttcatacctacagtccacgaaaaagccacaaaaaaaattagggttagttcatcatatccgagccaatctgagcctttgcataatctttttaggtttttgctttgttgaatttgcggttgcatcgtcgtgtctagttgctggtcttagagtctagtcttttagagtttcgagttctggtcataagttgtcacgccaccgccgcaccatcatcatcgcccctgccatctaccaccaccgcttatccgccaccgcttcgaatccgtatccatataccaccaccgctgtcatataccaccatcggctggcatct

SEQ ID NO: 11060 - DNA, 388 bp, Triticum aestivum
  Clone ID: LIB31-029-Q1-E1-E6
ctcgcgggtccacatgctgcgcaacacgcggtcctgctacagaaagccggggcgtcccgggtcttacggtgggcagcagccgcagcaacagctcccattgaagcgaagatctttgcacggatcgtccttcgcaacttggagctccaccaagcagggccttccacatagaagcaaaggatgatgagcaaacagcactcctacttttcactggtggagaagagcagctgacctatttattcccccatatccatggcttcggcatgaaccagacgacatgacggctatcgtcgtcgaattttggcatttcctcctagagaacttggttggcatcttgttgcttccgctgagtgtgccttgcgaatttgtgtggtagagcaagttaaggtaa

SEQ ID NO: 11061 - DNA, 354 bp, Triticum aestivum
  Clone ID: LIB31-029-Q1-E1-E8
gcgggtcgacgttcacatgacaacactatcgggttgacaacatacatctcatcaaaatatcgaacgaataccaaattcacatgactacttatggcaagacttctcccatgtcgacacctcagaggacagcgaagcatgcccgcctgttgcgtgatatgcttggaccgcttaaatcacatgaactcatggtaacataaaagatcatacttgtttgatccattggttgcgcatatgctctctgattcagattaactattgttctcatgcggtactttttgttgatgaggataatgctggcttttgtgcgctctataaagtctactaccctgcgtccaatgtaccatacaatttttt

SEQ ID NO: 11062 - DNA, 273 bp, Triticum aestivum
  Clone ID: LIB31-029-Q1-E1-E9
cgggtgcacagcgttgatgaaccaccgtctcttatactacacagactcgatagactcgctgactttaaagcctgtgtaatgcgtggcacacgccaatgtcgagtttaattgtcgtagtctccggccgtgatgctcgtatcgccaagcacacacactgccattgcatgaagtcgtccattgcgtagactcatagtgcaaagccgtgatattgggtctcgttgatggacgctaaaccgagtacagtgtgtgtgtgtgtcccttgctgcattggcg

SEQ ID NO: 11063 - DNA, 420 bp, Triticum aestivum
  Clone ID: LIB31-029-Q1-E1-F1
gggtcgaggctatcagggaactcagtttggagaatgttcctagaggttttgttgtagcgatggaagttcaatctacattattgggaaagattcgtgaagctcagaaggatgacaaggaaattgcggagataaaggagaagatgagtgaaggaaaagccaaaggttttcgtgaggatgagcacaacaccttgtggtttgaggaccgtgtttacgtgcccaataatgcggagatcaggaagttgatacttcaggaggctcacgactcgccatacttgatacaccccagaaacaccaagatgtatctgccacagccctagaatattgtttgtaaatagttgcatcttcatccaggcatcatatttaaatttctaaaacatgagttgaggattgttggaaaccctcaaaaccctaaataaaaga

SEQ ID NO: 11064 - DNA, 355 bp, Triticum aestivum
  Clone ID: LIB31-029-Q1-E1-F3
ggccaaaccagaaggtcggcaagcaaaagcagtagcaacaatggagaggcgtagcggcgtgagcgtgagccttgttcttggcctcctgctcgccaccaccgttgcttgccatggtgcgagggacatcccagcaactgagcccgagtcctaccgtccccataacgtctttgggttcggtggtttctaccctggcccgtccgtcaactgggtgtttccggggccaaacggcgtcacaccacaggtaggcttcggcgggatgccgggctctagctccttccctggcactagtggctcgtccggcagcagtggcgtggtcggcattcatggtgctgccaatccctgatcgtgttgttgt

SEQ ID NO: 11065 - DNA, 432 bp, Triticum aestivum
  Clone ID: LIB31-029-Q1-E1-F4
gggtccaccagaagggctttccacgtgaagtcttgtctatgcgcactgatgcaccgctctgatttgttctatgtgcatcaaggacaagtaaactatctagtacaacatgctttttcaaggacaacaagtatactattgtccttcgtaattggcgatacaaacttttttctccatcttggccgttcgaggtcaaaagattccatggagtggttaagccagctcgctagggacatggaaatcactagccaaactaccacggtactgccgtccacgccgaaaactgtttgtctaattaaagcagacagctgactagttaacatccttaatcgtggctggtgttggatgccttaaacttaaagctggcaaggtcatggcgcacgcggcctaatgagttgatcgagatctagaagtaatcaaatgcgcatgccgaac

SEQ ID NO: 11066 - DNA, 321 bp, Triticum aestivum
  Clone ID: LIB31-029-Q1-E1-F5
ggccgacatgactagtcgtaaacccaaggcggcacaaacttataggaacatgcatacatgacccagcaacgaaccgtgttgatcatgaacatatgaacgcaactcgtaggatgctgcaaggacttaaaggaataacgactgtcatttccctgaaaggacacatacattaacgaagaaggacacatgccgggcagcctaagtgttccggatcagtagcaagctaccatggatcagtggaagcactatgacacattttcccatatgagacgctattaagaataaacaactacgttgtccgatcccacacacaccaatcatttc

SEQ ID NO: 11067 - DNA, 350 bp, Triticum aestivum
  Clone ID: LIB31-029-Q1-E1-F6
tcgaccgaaatagagcccacagagagggtaacgatagagatgtacccaccagcagccaagtgcatgtctccggaccagagtgtttcagcagagccatcagagctgtggtgactcctcccaacttcaggctggcgactggagtcagcaagttcaacggtgagtctaagcccgatacttggcttgaagactaccgagtggctgttcagattggcagcgggaatgatgatgtggccatgaagcatctgcctcttatgttggaagggtcagccagagcatggctgaatcagttgacacccagcagcatttacacttgggaggacctctcccgagtgtttgtcagaacgttcgaa

SEQ ID NO: 11068 - DNA, 428 bp, Triticum aestivum
  unsure at all n locations
  Clone ID: LIB31-029-Q1-E1-G10
cacgggtcgacgtggcacgcgtatgatgatccttgctactggattggcaatggtaaccgccgttatgcatgtattcatcatgttctcgcaggccgagcgctcaagctctgcgaaagcagcaagggaccgagtgaagaaggattgatagctcgtgtgaaattcagtctataggggaactgccaatttattgtgttcagaatatatgtagacacaggctccatgggtcaaatctagtatgtccttgttgtcctcggtaagagcttcaggaattttgtgtggcgagaactgtgagctttcttccttctttctctactttgtaatgacttgtaaagatttgctttgccataccaggaatcgctgctcgaatttatcgaagcttttttttatctaaaaaaaaanaaaaaaaaaaaaaaaaaagcggccgctct

SEQ ID NO: 11069 - DNA, 370 bp, Triticum aestivum
  Clone ID: LIB31-029-Q1-E1-G5
ctcgcgggtcgacgctatcctctatagtgtgtcgtcataagaaatacaggatccgtcaaaaacgtctggtgacgccaatacaggctcagagcatgaacctcgactagctcatcgtactgaagaacaacagggccatgccatgtgcggaaagcctactgcattccttccatgtaataaatagcactggcatggctgattttttaaacgagggcgctgatttatacagttttttcttcttatgctgcaacaacaacatcagtgtctatcagatgagagcatgccatgtacagcggggtagatgttctcactggatttctacgtcggcacgacgacatcacgaattgcaacagcctgcctgtcgtcatcatgc

SEQ ID NO: 11070 - DNA, 267 bp, Triticum aestivum
  Clone ID: LIB31-029-Q1-E1-G8
gggtcgagaccacgcccatcgccaagatcgcgctgtttgacgccgagtttatcacagggagggtgaaggtgattctctcgggtggaggctgcggggagtccgtgatgtatgtcacccagtcgtccttcagctccagggcttggtggttacggaacaatgacgccacatgtccgtcagagcccatgctgaggacgatgagatcaaacttggcgcagtccgtgctctccgagactcctatagtgcggatcttggacagctgcctgatga

SEQ ID NO: 11071 - DNA, 364 bp, Triticum aestivum
  Clone ID: LIB31-029-Q1-E1-G9
gggtcgacgttaaccactcaccccagccatcgaagtacctcacaagttatgtctctcctttctctgacacaggatgattgatcttcctatgtcattacgtcagcttagtacatccgtatcgccctccatcattcatgcatgcctcctgattcagtctttcacagacttgtgcacagacaggcagttatccccacacgatctgatattgcaggcgtgcgctccggttgtccatcaagcctatcacaccatttgttggcagcagtgctagtaccactccctccatgagtcaatctctgtacctctccgattcttactcatctcgtacacatacgcatggatgccgatcgatctcgcgtaatacatg

SEQ ID NO: 11072 - DNA, 435 bp, Triticum aestivum
  unsure at all n locations
  Clone ID: LIB31-029-Q1-E1-H1
gcgggtcgacatgagacgatagctggagtcgtaattattttcattcatttgcgctctatatcgatcggcctattttgttcatttcctaatatcaagtaactaataactctcttgttcatttaattttctttgcctcgtagcgtttggagacggttcgtagatacaaaggtcggtgaattcaaaaaagagctagaattcaaaagggcaaaggctaagaatggtgaggatattcagccagcggggaccaatctatgtgcatactatgtctgtgagatgatccggagatacacctctgagcgggttccgagtgataccaatgctcagaggaataacctccggatgatgcttagtccagaagctcgcttccgaccacttcaagaggaactanctggatggttcaagagggaagtcctccatcctaaaggagaacaccat

SEQ ID NO: 11073 - DNA, 432 bp, Triticum aestivum
  Clone ID: LIB31-029-Q1-E1-H10
gtcgacgccgatcacgatgttgggtcggcattagccgacgtcgatgcgggaactacttctatatatagttgagtaaaagtagttttattaattaaatcaactatctagttcaactactaagcacttactataaataaataagtagtacttactaaagacaaactacgtcgatatatagtagaataagttaggttattaaattaactagctagatcaactatagatgaactacttcttatttttttcctttttctaaatactttgaacaaaaaaatcattaaaattctatgaacaaaattaattactacacatctagtctaaaaaaaaatctaatctagcaacaaaaatctatgaactacatatctaaattactacacatctaatcgaacaaaagaaatctaattaatctaacagaagaatctaacataatat

SEQ ID NO: 11074 - DNA, 79 bp, Triticum aestivum
  Clone ID: LIB31-029-Q1-E1-H2
gggtcgacgctgatccatagatggagtcgtctaaatcgattgatctccatctggaccgatccatcacgtgtgatacctc

SEQ ID NO: 11075 - DNA, 359 bp, Triticum aestivum
  Clone ID: LIB31-029-Q1-E1-H3
gggtcgacataaccgatagactaacctctgacgtgccttgcctacatgaccatgcaagatgtcaacgcccttcctacttttaacccacatggtgggcccataacccacagttccacatgatcgaaacctgactctccaatacaccctgttgtcgaagttattcctcgcgcttggcttcatatttaattcagggccacctttctagtgctctattctggtatcagacgcaatacttactctcgctgctctgaaaccctttctcactctggttcagacttcgagcagctatctatccacttggcacctcctattgtaccttcatatcttactcttgatgtattcgatatgttcaactcgag

SEQ ID NO: 11076 - DNA, 377 bp, Triticum aestivum
  Clone ID: LIB31-029-Q1-E1-H4
cacatgtcaagcaggcaacaaatgacattaatgcacctgcaaggatgagggtggctgcaaacgagaaggcggaggctgagaacattgtccagatcaagcgtgccgagggtgaagcagaggccaagtacctgtctggcctgggtatcgcccgccagcgccaggccattgtggatggcctgagggacatcgtcctgggcttctcagtcaatgtgcctggcaccactgcaaaggacgtgatggacatggtgctgattcaccagtactttgacactatgaaagaggttggcgcgtcctccaagtcctcggcggtgttcatcccccatggccctgacgcggtgcgccgacatccccacgcagatcccccaacggtcttcttc

SEQ ID NO: 11077 - DNA, 307 bp, Triticum aestivum
  Clone ID: LIB31-029-Q1-E1-H6
gggtccacaactttcaccggtaatctgtatgcaacgtcataggaagaaaaactatcaaatatgtgaaggagcagtaaacaaaaggatcttaagctacatctacatatattacataaggatcttcaattatgggaaacaaaaagatatgcaaaaacacacatcaatgtaatcactggtttcaaccacaataacatatccataaactttccccccaaaaaaaaaaaaaaaaaaaggaaaaaaaaaaccggccctccaaaagattcaaacctaacttccccttcaatgcaacttaaaacccctccaaaat

SEQ ID NO: 11078 - DNA, 414 bp, Triticum aestivum
  Clone ID: LIB31-029-Q1-E1-H9
cgcttgcccgtaccggtcctagattcacgggtccactcgtgatagctccagatctcatcgtccttggtagatctcgcagccgaagcttgcggtctctgtcggctatgaaatgcaggagggaacaaggagaacgtgtctggactccaggcttgatgttctaaagaggaaaccttgttttagtgttgggtggatgataatgatgggtgggatccgactggatgcgacggtggaaccgaactgaactgaggttgggtgttggtgcaagctcgcccacctggcgccgaaatgaaacgcggtcgctctcatctccatcagatcgaccagaataccatctcatcaatcagtaaggaaaattatcggccggaagatactacacactctgaatctgaatagagaaaattcaactttcgctta

SEQ ID NO: 11079 - DNA, 445 bp, Triticum aestivum
  unsure at all n locations
  Clone ID: LIB31-030-Q1-E1-A12
tcacgggtcgacaccactccctaaagtgggtcgtactatacgtgcatccttttgccactgccgaagccccctatccttgagcttgacaagctcatgtggcatcctggacgacgtcctcgccatggcgcccaagcctcgcaaccacatcgccagctgccgccaaagctgatcatgttggcagaccaggatgaggacaacccataccgcacccaaggtagtaatttcagtcatgcttaccaacaagtttttttctacgaaaacaaaacttttgtttctgggcagcatgttcctcccgggcatcaacactgtgcaactttgaatcaaagggtgaggtanctagctcccttattgttgttttatttgattttcctaaggcattacatacataattgtaacccggcctaagcttcctagaaatacataagtctcactaggaagtttggat

SEQ ID NO: 11080 - DNA, 433 bp, Triticum aestivum
  Clone ID: LIB31-030-Q1-E1-B11
ggtcgacgccaaagacgatctcaagacatgcaagcgcgagatgtcagtcgccacaagaggagttgagcgagagattggctccctgcaaatggaggagaagaagctggttgctgagatcaagaacactgccaagactggaaatgaggctgcaaccaaaattctagcccggcaactagtcaggcttaggcaacaaatcgtcaatttacaaggtacacgggcgcagatacgtggagtagctactcacacacaggcaatgtatgctggaacttcaatatctgctggaatgaaaggcgcaagcaaagcgatggcagcaatgaataagcaattggaaccaacgaagcagatgaagcagatgagagaattccagaagcaatcatctcaattggacatgacgcttgagatgatgtctgatgccattgatgaaacactagat

SEQ ID NO: 11081 - DNA, 451 bp, Triticum aestivum
  Clone ID: LIB31-030-Q1-E1-B9
gtccaggggtcgcagagacttgcagaacacgcaagctttctcatggagctcgtgtccaatgatactgaaaggaaaaatggagtgaaagtgctactgctccagttttgaacttcttattcagtcatgctattactgagtgaaaaatggagtcaaagtgtattgcaattgatctctcttagaccctggcaatcctctatttttatcctttgtttgcttgtcttttggtctgtaattcaagaactttgaccttcgtaattcggtttttggttaatttattatgcccggtacaaacctttaaatctgaagaggcttctaatagcaaaaaaatgtgcagccggtgtggtctatatgtcaattcatgtatgaaaatgtgcattcggtgtggtgtatatgttattcgtgtacatgtattatatgtgtgaaaaaatttctgtatatgatgagatgattg

SEQ ID NO: 11082 - DNA, 447 bp, Triticum aestivum
  unsure at all n locations
  Clone ID: LIB31-030-Q1-E1-C10
ctcacgggtcgacgaccatgtgtaaactaagtcgtcataaatctcaagatgatatgctctcatagagtanggtgtgcatgtgtacattcatagaggtgagtgtaatcgcgtatgtatgagcggttgcatctgtactgtgttaaaaaaactcctactattatacatgcacgtagccaattcatcctcggagaccatgcccaactcaggacatgcaccatccatcaacaaaatcggagaagcagtgcagcccgccataaccccccaattatccaacatggctacacacattatttgattttagcctgcaaaaaaaaatgcaggagtcccgatagcatggaagcatcgatttttttcactgaagacaccaagtgaatacaccaaaaaataggtcaaatgtgaaagggaaaataacagggtaaataaactttggaaaagaccctataggag

SEQ ID NO: 11083 - DNA, 448 bp, Triticum aestivum
  Clone ID: LIB31-030-Q1-E1-C12
tcacgggtcgacggacctcccgaggatgtgtcctgttagacagtgagcctagtgagtgagcacaaacatgtctgcctctgtcatggcgtctttggttctgctgaaaccatctccctctccactgttaggacgagcgaagctccggggtgtgcgaccatcggcgaggccatcgctgctcatagtagccagcaagaaggcgaagaaggtccagactgcccaaccctacgggcctggtggtggagtggtgttcaaggaaggcgtcgatgcgtccggaagggcggccaaggggaacggtgtttaccagtttgccgacaagtatggagcaaacgttgatgggtacagcccgatatatacaccagaagaatggtctccaagtggtgacgtttatgttggaggaaagacagggctgtttctctgggcagtcactctttctggaattctgttgggt

SEQ ID NO: 11084 - DNA, 442 bp, Triticum aestivum
  Clone ID: LIB31-030-Q1-E1-D10
ggtcgacgggtccgtgcaactcttctgcgccgatcccatcaccactcgctactgtatgaagtaccgccactgcgacgggaagctcgtgctcaaggtcaccgacgaccgcgagtgcttgaagtttaagacggatcaagctcaggacgcaaagaagatggagaagctcaacaacatctttttcgctctcatgactcgtgggcctgatgctgatataagcgaggtttcagggaaggaacaggcggagcagcagcaatcgaagaagggacggggcaggaggcagtagtatcatgttctggatttctttcagaaagatcacaactgggagtggtgggtggatattttgatggactcctgttagtcatgttacaactgtgagtggtgggtggtctaagagtggcaaatagttttcagacaatgtgcgccatcttcggatccttttcct

SEQ ID NO: 11085 - DNA, 375 bp, Triticum aestivum
  unsure at all n locations
  Clone ID: LIB31-030-Q1-E1-E10
tgaacaccatgaaagagatggtgggactatcanaggatctgctctcatgggctcgacgacatgacctcgtctgaagatttgcaggaggccttcgacgtcatgggggcgctgccagacgtgttctccagtgggtacacgaaatgcgatgattttgtccgggcagccatacaggctgggaggaggagctgatcagccacaactcctctccactgtttgtgttgatataaggcacgaccctttttgttttgtatgatgagatatgcagcttatgtgtgtaaacagtctagcacttggacatcagctggttgaacttgtataatattatgtcgtggaattgccggccttcattctcaacatgctttgctcctgctgcca

SEQ ID NO: 11086 - DNA, 386 bp, Triticum aestivum
  Clone ID: LIB31-030-Q1-E1-E12
catctatatgttcccctgtgcctgtgttggcagtaggatgatacaagtacatgggcaggcatagcatgcagacccaagtccgtttcaaaggagctgtgagttgggtttgctacggatatgtgccatcacatcagagtccagtaacactaattcagacagtggcagttatactgcagtgcagagcttccaccaacatgttgttgcagcagcatagcagagtatgcatgctgtgttgctggctgttccgcgatacacatctccagttagcagcactgacccagcaccaatccgatcatgccgggttcctctcaaaccagggacagtgagcaaggaaaaggcccgacaaatgtgtgttgggacaaggccatgtgatgcgtgccgctatc

SEQ ID NO: 11087 - DNA, 448 bp, Triticum aestivum
  Clone ID: LIB31-030-Q1-E1-F10
ggtcgacgggccgctctaaagaggatcgaccaagctgagaaggcaaagacagaggcttacatactcgagttggtcgtgcggcttcaccaccttgttagccagagcaaccggccggcaaatgttaaaaaagcccagtccatgtaaccatcatcaggtcatggggtgatgacaagcgcattacacacaagtcatggcctgacaagagcagacagaaagccattacgatctgtttcgttttcattgttgctaggttgtatagaagggggaactgtgtctgttcttaccaggaaggacttgaaacctgatattaggtagggaaataacaagagcttctcctttcatcttttggtttctttgagaggctgggttctaattccatctcatgtatgtggtgttgacattgtttaacacctcaaaacatcgtggctaaataacaaacttaatacta

SEQ ID NO: 11088 - DNA, 456 bp, Triticum aestivum
  Clone ID: LIB31-030-Q1-E1-F12
ctcacgggtcgacgagtctcgctacagtgagtcggcccatgatcttgacgacatcgtaacttcaatttcacagctacgaatgaaaaacgaacacggagaccccttggacgcgtaagaacatgcactaccaaaagaccttgcatcactatgatcataattttatgagatttttcaagtccacacataaaacatagcatttataaagtagatgatcgttatcacttaaatttctagaattgttgctggtggccggttgaaaatttggtgtatgggagggaaaaaagcaacccattgatgagtgggtcccacgtgacaagaaagattctataggttgctattacaaaaaatcatttcaagatttttgtatttacatatactgacactagtagaaaacggggcttacgttcgggccagataagcccattagtcttggttccgtcacgaaccgggacccat

SEQ ID NO: 11089 - DNA, 448 bp, Triticum aestivum
  Clone ID: LIB31-030-Q1-E1-F9
ttcacgggtcgactgtccggacgaaaatgccctatcagccttcaaacacagcattcgggatgaatggctagcacgccatctcggacaagaaaagccagagccaatggtatcccttacggcactcatgacccgcttttgcgcaggcgaggacagctagccggctcgtagcaaaaacacagccagtgaggcaggccctacagaggccaggaacagcactggcaagctccggcgcaatagacacaaacgcagaagcaatggcgacaacatcaaagacaccacagtcaacgccggattcagtggctccaagtccggccaacgaaagaaaccctacaaaagaaataacaaaggaccttccagcctggaccgcatactcgaccgcccgtgcgaaattcatggcaccccggataaacaagacaatcataccaacagggattgttgggtcttcaag

SEQ ID NO: 11090 - DNA, 427 bp, Triticum aestivum
  Clone ID: LIB31-030-Q1-E1-G10
tccctaaactgaatcgtacaaatcaggaaaagtggttcactttcttatcctttggtaaaacgataagcttgaatacaggcatcataatcgaaaaacagatgaccaaaaaagagatgttaactattcatgataacaaccatcatggcaacaaacacattacaccactgatcagctagtagatctcacaaggtcagcactgagcaagtcttcattatctttaacatagctcttgaaatctctcgctacactcttcacattaagctcattattttcagcaccgtatgacgtacaatcaagcacaagctgcaaataagccaaaccataaatatacaggggaaaaggataaacaaagcaatgtattatcataactcgtaaaccaaaatatgcgttcctgtctaagagaaacacaagatctggctggttaccg

SEQ ID NO: 11091 - DNA, 428 bp, Triticum aestivum
  unsure at all n locations
  Clone ID: LIB31-030-Q1-E1-G11
tcccgaaaatgagtcgtagtaatcanaaggatggcacctcaatgctcttcagagacccaacagtctgcacatctgcgtgacgcttcaacacacggctatctatgaggaattcctcaaggacctcgaggattccgtggacacagtgaaagcgaatccagggcctatcagtggggggatggctcccatctatggcgcggctgggaagatgccggacagaggcacggtcaaggagttgcttgtggagttcatggacagctcttgctaaccattgactataccccattggttatctctctgtaacatgtatgactgttgtgtgatcttctatatttggtttggctgcaaaacagaaggcacacaatgcctccaatacagacatgtatctatgtatcagttacattggttgcaatgaagttacattttcagcc

SEQ ID NO: 11092 - DNA, 396 bp, Triticum aestivum
  Clone ID: LIB31-030-Q1-E1-G12
ttctagggtcgacgtacccaacgaacatgaaaaatgccgttaagaagaagcgcctgctcgccccgttggcggggccaaggcgggcgattccgacagtcatcgggttagtggacttggttcttttttaattgcctgctacttctctacacttttcccatgttcatgtcacaccatgcagatccgcccttgacctgatgttgacggcgacggtggaccagaccatagagtgggagccggaccggaccacagaggacctcgtgacctggcagactggttgcaaacctgacgtcacggagcgtgccgtgtggcgagaccgggagctggcaatgaaagaggcggcggagcatgcaacgagagacgaagaggctttagcttacgcgcgtgatagagccgccc

SEQ ID NO: 11093 - DNA, 435 bp, Triticum aestivum
  unsure at all n locations
  Clone ID: LIB31-030-Q1-E1-H10
acgtccctaaactgaatcgtactactactccagaactgccaccgcctagccatacatttgtcgtcgccagcagccacgatccgccatagccggccaaccccgctgcatcaaactcctttgtggagagatcctccttgcctttgcaggagccacatggtcttggcctggcggcgacgagagggctggaaaagttggcggcgagggatangtctgacctgtcgtgtgtggctatgcgtgcaaattcaaagaaatcccgagtgggactactaattgactagaatagagttttctccctttttttatcatgtataaggtgcactggaccaaaatcgcaactcagtagaaaaatgccgattcgattgaattgttatcaagacaaggcaatattactattttcagtagtaagaataattccaggcagtagtgtcatcaaga

SEQ ID NO: 11094 - DNA, 372 bp, Triticum aestivum
  Clone ID: LIB31-030-Q1-E1-H11
ttagacataattatttatttatattggtgttaaacctactgcattcaaacttctctatggtttataaactcttttactagccatagattcatcaaaataagcatacaacacacgaaaaacagaatctgtcaaaaacagaacagtctgtagtaatctgcaactaacgcaaacttctggaactccaaaaaaatcagccaaaatacgacgacctagccaatttgtttattgatcagcagcaattggaatcaatattttatcacgttctggtgttttttaacaattattttcatgaacagaaagtttctgggaattacagcaagatcaaataactatcatccaagaagatcctataagtttaacttgggaaaaaca

SEQ ID NO: 11095 - DNA, 419 bp, Triticum aestivum
  unsure at all n locations
  Clone ID: LIB31-030-Q1-E1-H9
tgactcgtcataggcggcttanggcaagaaaacaactcatcgagagccatgcatagcgtatctcgctccctagtcatcgaaacatcaataccaacccaactagacgtaggccttaccttcaccataaggggccgaactagtataaaccctctcgtgtcctttgtcccatttaaccccttcaagcttcctagttgcgatggctccacaactaagtcctttcacgaggacatttgacgtgacaattccacgacacatatcatcaatatcaatcaagcaggagtagggttttacctccatcgagagggcccgaacctgggtaaaaacatcgtgtcccttgtctcctgttaccatccacctagacgcacagttcgggaccccctacccgagatccgccggttttgacaccaacactttgttat

SEQ ID NO: 11096 - DNA, 363 bp, Triticum aestivum
  unsure at all n locations
  Clone ID: LIB31-031-Q1-E1-A1
cagcacgtaccccctcgtcaagacgttacggaagcaagatcctccgcatcctcaaggctcatggcctggcgccggaaatcccagaggatctgtactttttgattaagaaggctgtggccattangaagcatcttgagaggaacaggaaggacaaggactccaaattcaggctcattcttgttgagagcaagatccaccgtcttgcccgttactacaagcgcaccaagaagctcccgcccacctggaagtacgagtctaccactgccagcactctggtggcttaagagggctcttcatctggtgtgctcttactggcttcaggatggtcttgttctacatattatcaatttcatgtaacgcttt

SEQ ID NO: 11097 - DNA, 383 bp, Triticum aestivum
  unsure at all n locations
  Clone ID: LIB31-031-Q1-E1-A12
ctcgcgggtcgacctaccaccatatgttttacactacggatactacctggcatacttctggatgaacaacaggatgactagagatgctctcgggatcaaggggggaacagttggcgagtgggtgagatgcaaaaaagaactcccctacacacaggacatgccaagcagcataccgtaccatcttaatctcaccacgagaggttaccgtgcactcgtatacagcggagaccatgatctccaggtgcctcagctcagcacgcangcgtggataagatctttgaacttctccatcggcgatgaccggagggcatggcatctcgattgccaagctgcaaggatttaccaccacatatgcaaataacttaacctttgcaccattaaag

SEQ ID NO: 11098 - DNA, 453 bp, Triticum aestivum
  Clone ID: LIB31-031-Q1-E1-A2
ctgcagtacggtcgaaaattcacgggtcgacaagtatgacattggagcgggctttggacattttggcaacccacaataaggatttttcaaactgggttgaaacatttaaacaatcctcaagttggtagaatactccgtgaacctggtcctgtcaaaggagggtccactgtgattgcttttgcaccagacccagatggttacatgttcgagcttatccagaggggtccgacgcctgagcctctctgtcaagttatgcttcgtgttggtgaccttgatcggtctatcatgttctacgagaaggcccttgggatgaagcttctgaggaagaaggatgtgcctcagtacaagtacactattgccatgatgggctatgctgaggaggataagaacactgttctggagttgacatacaactatggtgtcacagaatataacaagggcaatgcatatgct

SEQ ID NO: 11099 - DNA, 433 bp, Triticum aestivum
  Clone ID: LIB31-031-Q1-E1-A4
cacgggtcgacgtttgacggtatattgggtcgtgttaaatagagtacgttataagaaattaatcggtcagttgaatagtcgggagcagtaatttaatcgttcaaatttttttcttgtgttagtatttttttagtagtcttatagtagtcttagatttttcattttgatgagcctcgctttgaggaattcatggaataatccattttcatggaataatgaattaaggaagaaaggatatgagtctaccgcttacaagaaaagatctcatgatagtcaatatggggcgtcaacacccatcaatgcatggtgttcttcgactgatcgttactctcgatggtgaggatgttattgattgtgaacccatattaggctatttacacagaggaatggaaaaaatcgcggaaaaccgaactattatacaatacttacctta

SEQ ID NO: 11100 - DNA, 423 bp, Triticum aestivum
  Clone ID: LIB31-031-Q1-E1-A5
atcggcttcagttagcagcagtagtgaaggaatcactcgatcgggttcagtcaacagccatcgatcgatcgcttgggtttagtaacgcgtagcctgcagtgtaatcgctcgggttcagttagagcctgacgcctcgctcgggttcagttagagccaacgcctcgcacacacgcgcgtacgtgtacgagagaagcgcgcatcgctcagccccaacctcccaccgtaaccgggaactccccgaaattttcctccccctcgcttctaccatggttttttccatcatggacggcccaaagaatgtcatgcagctgcgtctcccgcccgcccaggacgaaaagcccattttctgtcatgattttttgtcatagaagtaggagcccaccacatcaatgatgatactgggttttgtcacaattatcgtca

SEQ ID NO: 11101 - DNA, 236 bp, Triticum aestivum
  Clone ID: LIB31-031-Q1-E1-B1
acctccacttccttcctcctcctcagtcggtgcctgcgcctcgttgggcatcgaatacaactcagtggtagcctggaagacaacaaaacaagacaagagtcaatcaaccgatttgcagtgaaatagaatgaatgaaacaggatcacaaccgaggataggtgttcataccgtgtctggatcgaaagactggtcgagcggcgggatcctcctagccccacgaaggttgtccttgttcc

SEQ ID NO: 11102 - DNA, 426 bp, Triticum aestivum
  Clone ID: LIB31-031-Q1-E1-B10
tcgcgggtcgacattgcacactagagtgcatcctcatagaaacaatgtagaatttttcatgaagattctcaaaaaactaattatccccttgtacgattccattgtattataaaaataatgtgccaagattttcctttaggatgtttagatcgcttgttggtttgtgcggtgcaaaacagaaactttggctgtagtgctcgattttaaattttctactcgaatgtcaaatggttttgaaattttttgcactgtatttatatacaaaatttttatttttcctaattttttcagaattgttggagtaccataggtatggtgaatgttcagattactacagactatcctgtttaagacagattctgtttttgatgcattgttttgctcgttttgatgaaactgtcaatttttatcaatagtataagctat

SEQ ID NO: 11103 - DNA, 222 bp, Triticum aestivum
  Clone ID: LIB31-031-Q1-E1-B11
gggtccacatgctgcgcgagattcaggcggatgaacgtagctttggttttgatcaacctcatcctcataatcgcccgcatactcattaacctcctgggtaccagcagcagcagtagcatgagccaaagaagcatcaacaacagggatagcagcaccagaagtttggccaccctcaagaggaacacgcttcgctcgtccatactgagtcgaaaggggcgttgt

SEQ ID NO: 11104 - DNA, 199 bp, Triticum aestivum
  Clone ID: LIB31-031-Q1-E1-B2
gtgcgcacggacgcatcagtccgtacatgtcgaacccctgccacattgagctgatcgtgtcagagaaagaaaagcctgtgaacaaggaagctgaaagcgtcgtcgcaccaaggaaagccacccaaactaccggaatggatgcgatcatccaacagtccgagttgtagttcttcacaagtacctttgttggaagtgtttg

SEQ ID NO: 11105 - DNA, 412 bp, Triticum aestivum
  Clone ID: LIB31-031-Q1-E1-B3
cagcagtcatacggtgatccttaagctactggtagctatgggcagcctacaacgtattctactgaagctacagcaactgctgcttcccaagattaatctgccggcgcaacttgccctaacacagcaactgccgctcctgctcctgccaacagtggtgcccccaaacttctccgagttgagctgcctgctcctgcctcagctgcatctgcaatctggtttcgttggctctgctgcttgaagtataatcctcactctatccatgttatcttactttttattgcttgcttgtgaactttatatattgctatattatatcctggttttgctgcttgcgtatggcatgtactgctgtgcttgtgatcgctggtgcataatgtgacctatactttggatactgaaatgcaactgttca

SEQ ID NO: 11106 - DNA, 294 bp, Triticum aestivum
  Clone ID: LIB31-031-Q1-E1-B4
gtcaacgacagacggtaaaaccaaaggaaataaaaccacttacacacaaagtgattatagaattgttcaagactgtgaaccgggaggttcctggtatatctacgttcattgtacttagttaagttgatgttactgttgttttttctcgctgccgccatgccatgagcaagcgaggcaggcagcttctcaaacttgtgttgttgtaacttgtatgatgggagcttaagtacattactttgtttcaaaatacaccatgttatctcctttgtttcttaattaatgttggacactggc

SEQ ID NO: 11107 - DNA, 442 bp, Triticum aestivum
  Clone ID: LIB31-031-Q1-E1-B5
ctcgcgggtcgacatgacactctatcgtgagtcgtatgaggtcggagagttccgacctatgatatttgcggaagtacctaatgttactagttttagaggggtggtagtatatgttcatggattttaccctcatgcggggggagcagttgtccgacctgggagatttcctggccacattaatggtgtttaccaactgggtgattttacataccttgacggagacttcacatctgagtctggaacgtctggtggaccagttaccatgggagatagagttattggagtaaatgtgcaaagtgtgggaggatcgagatgcgcggtttcccctctgacactatacatgacatttatgaattggtgtggttttaatggcggagaccatacaattgctgcgatgatacaacgccttgctgcctaatcagttttgcaatgtcaagcatca

SEQ ID NO: 11108 - DNA, 378 bp, Triticum aestivum
  Clone ID: LIB31-031-Q1-E1-B9
tcgcgggtccacatcacaccatatactcattcctagcaggcgatgaatgagatcaatgcagctgcaaggatgagggtggctgcaaacgagaaggcggaggctgagaagattgtccagatcaagcgtgccgagggtgaagcagaggccaagtacctgtctggcctcggtatcgcccgccagcgccaggccattgtggatggcctgagggacagcgtcctgggcttctcagtcaatgtgcctggcaccactgcaaaggatgtgatggacatggtgctgatcacccagtacttcgatactatgaaagagattggcgcgtcctccaagtcctcggcggtgttcatcccccatggccctggtgcggtgcgcgacatcgccacg

SEQ ID NO: 11109 - DNA, 415 bp, Triticum aestivum
  Clone ID: LIB31-031-Q1-E1-C10
tatggtcctagcatcgcgggtccactttgggatgaaagtgccaaggggaaatagtactcgcacgtgtgatctggttttctgcaaaatgctagttacagttgcttggtcccttgtttcttgctatcgggtttaaaatccaagcttatctgtttggccatccttacctgtggtttgcccagctaagccgtttgaactatttatgtatctatattgtcatgccttggtacctccctacctgttgtacttgattcattcatcgcgtttgctccgatgtggtattacttaggctgctcaagtaatgagcatattagttgttgctactaaactttctcactccgctgtaatgttatatattgtctctggaagtttaagcttattggtaatgttgctgctacattgttatgtagcatcctcc

SEQ ID NO: 11110 - DNA, 447 bp, Triticum aestivum
  Clone ID: LIB31-031-Q1-E1-C2
gggtcgacgtccatcactacgatgagtacgctatcacatcgaaagacgggacacctttgcctctatcaagtggtatcagatttccaggttgctcggtgagattttacagtttttcgtagtttagatcgagtctgttcttcatacctacagtccacgaaaaagccacaaaaaaaaattagggttagttcatcatatccgaaccaatctgagcctttgcataatctttttagggtttttgctttgttgaatttgcggttgcatcgtcgtgtcaagttgctggtcttagagtctagtcttttagagtttcgagttctggtcataagttgtcacgccgccgccgcaccatcatcatcgccttgccatctaccaccattgcttatccgccaccgctttgaatccgtatccatataccagcaccgctgccatatactaccgccatatatccac

SEQ ID NO: 11111 - DNA, 439 bp, Triticum aestivum
  Clone ID: LIB31-031-Q1-E1-C9
acgctgcagtatggtccgacattccgggtccacacttttgagacacccatggtcaacacgtgaggaaatggtgatagctgacatgcaaattaggcctggagaagcctgggaatactgtcctagatatgccttaagaaaagtcacaaaagttctgctggatgaattcaatgtgacaatgaaggcaggttttgagaatgaattttatctccgcagaaaattagtaagtgagggacatgagcgttgggttccatatgataatagcagttactgctcaacctcatcatttgatggtgcctcatctatactacaagaagtgtattcttctcttaaagtggcaaatattgtggttgagcagctgcatgccgaagctggaaaagggcagttcgaggttgccttgaagtatgtcctgtgcactcttgctgctgacaatttgatatat

SEQ ID NO: 11112 - DNA, 215 bp, Triticum aestivum
  Clone ID: LIB31-031-Q1-E1-D10
gtgagtcgtagtaggcgcagcagcgcctagaggagcagcgcgaactagagccagagcagcaactcgtgtagttgttgtagcccaccagcatcagcagcgtgagcgagagcaagagcagagcagcagcacgagcgacggggagagcacagcagcagcgcaagtgagagcgggagcggcagcagatctgggtggtgtggatgtcgccgccgccgaag

SEQ ID NO: 11113 - DNA, 356 bp, Triticum aestivum
  Clone ID: LIB31-031-Q1-E1-D11
tggtccggacatcgcgggtccacatccatccaagtgatccatagcgatacgcccagaggacgcagatcgttggcacaaacaagttgcagcctggggatcaatggcactgttacaactgaaacattttcgacatttatataccttcagtgcatcaaacggaaaatcgacgacaacctgacatgcaagtctatgcatgaggacagtatgtgtgtaccatcactgtccttatggtttgctgctcaaagttagagcttcgttaacttgacggtctaagcagcatgtcatattagctctcaaatggtcgtcccttttacgagcccgtcagtctgaacaaaaattgtcacgccgccgccgca

SEQ ID NO: 11114 - DNA, 398 bp, Triticum aestivum
  Clone ID: LIB31-031-Q1-E1-D2
ttaatcctaataatggaaggaattacaaaccttttattcaaaaggtccaaaaaggaaccccctaaaatgaacaaaaggtctttcaattacccctgggtgcttgacaagcccaaggccgaccgtgagaggggtatcaccatcgatattgccctctggaagttcgggaccaccaagtactactgcaccgtcattgatgcccctggtcaccgtgacttcatcaagaacatgatcaccggtacctcccaggctgactgtgctgttctcatcatcgactccaccactggtggttttgaagctggtatctccaaggatggccagacacgtgagcacgctctccttgctttcactcttggagtgaagcagatgatctgctgctgcaacaagatggacgccaccac

SEQ ID NO: 11115 - DNA, 399 bp, Triticum aestivum
  Clone ID: LIB31-031-Q1-E1-D4
gaaataggttggaacacacagaaagagagagagaggacagagagagggagggaaaggggtagagtgttggatgggtgatggagttgcttctcgaagatggtgggagaggcctactagaaaaactgagggtagaactacaatattatcaataagagtggggatgtgtttctgtgtgtgcctgtgcgtgatagatctgtcgggacgcatgcatggatgatgaaggggaaccatgtgtttgctaagcaaacctaactatatcggtagatcaattgttgtttgtcggaggaagggagagacataactaatgaggtagatcgatcgacgcgtggggaaaaacgagttataattaaggacctagctagctatatgtatagcgggagatctgtcagtgtacatcca

SEQ ID NO: 11116 - DNA, 454 bp, Triticum aestivum
  Clone ID: LIB31-031-Q1-E1-D7
cccgggtcgacgacgaactctacactaaggcctcacacgcctccgaacaggcccgctccatcaagattcttgaccagagggtgcagtctctggaacgtgaactggacgctgccatttctgcagctgctcgagcccgtacggaaaaacgccaggctgaagctgctcaacgagctgcagagctgcgtgcacaggaagtcacgaaggagctggagaacaccgcaagagttttccagctgcacatggaagagctgcgggcaaaacaagaggagatcgccaagagagatagtgatatcaaggtgttggaagcaataatacgaaccctgagtagcaaagatgatagcggatccagcgagtaataaccatacactgggagcatttgggcattctcattgatgctttcgtgttcaagcatcccggcacatatttatcgactccatgtaagcacttcaatact

SEQ ID NO: 11117 - DNA, 461 bp, Triticum aestivum
  Clone ID: LIB31-031-Q1-E1-D8
cacaggtccaggactcgcgggtcgagcggacgctttaaatttagtcttattatttttttttttgcaaagaatgaaacatcttcactatatcccgagtcggtaactttctctacaattacacgccgcccgtcgaacaccctcgtgagtctgcacactacaaacaagcacggacaaatttgccaaacatctacaggaagaacccaagctaaaaaaaaactaatgttctctttgctttttcttttgtcgaaacaaaggagcagacggcccgtgtttcgatctgtataaacaccacgccgctgctatatcaggggttcggagagctccatctcgttggaggtctcctctgcctcggcaggcggcagtcgtacgtagttcagccccagccactgccatggccagcacacatacctgtggccgctgcggctgctcgggtccgccctattgtccgactcctccgcctg

SEQ ID NO: 11118 - DNA, 393 bp, Triticum aestivum
  Clone ID: LIB31-031-Q1-E1-D9
gggtccaccactgcctcaaccacaaccaccagatgtaccagggagcccctacatcgaccggatcgaggtcatcttcaacctccgcaccgccgctcaccgtcttcgattcggcctcaccggagcctcctcgagcccgctttgctcacctacaggatcgataccccaagactgccggcgacccccagttcgactactgtgttgacgacccctgtcttttgccagagcaaccagacgatggagtccaggatccaaacgccaccatcgacgatgactcctactacgccggaggtgcctactactatgtgtagcccgctgacgatgaccaggagtagttaggaggatcccaggcaggaggcctgcgcctctttcgatctgtagcctaatttgtgctag

SEQ ID NO: 11119 - DNA, 437 bp, Triticum aestivum
  Clone ID: LIB31-031-Q1-E1-E11
tatggtccgacattcgcgggtccactaaatgtcgtcaacaattatccctgcgtcctctggcgcgtcgtcctctggtgcggcacctcctcttgcggcttccttccgtggagctctcttcataatcctggtcattgctcacgagaggtccatcatctccactcgggaaaaggtcttctcctagatccatcttctcctccagtgtggcaatatatttcttccggtcctcgagtctttccataaaatccttgacttcatcctgatgctcatagtgggcttcacgtgttgcatcctctagctcaatttcacgaagatgcaacttttggaccgtcttcaagctcttgcgcatctgaatctctagagccctgatgtgagcctccaagtcttggacatatgagcgaacggagtcgtcatctatggtgcggataatctctccatct

SEQ ID NO: 11120 - DNA, 404 bp, Triticum aestivum
  Clone ID: LIB31-031-Q1-E1-E12
gcgggtccatactcttccagatcaagtttcataaaaatcacactaatattcaacaccctccaaaatagtgggatcactaattcctaaagttgacactcttccaaccccactttcgattatagtattattcatactccaaaagatataagtgaagttcatggagcattctacaattaatatagactaaccaatatcccagctcaaaatatataaatgaagcacacgaagcattctgtaaaaccatactcaaaagattaaagtgaagcacaaagagcaattctataagatcatacttaaaagatataagtgaagcacatgaagtattctacaaatcaatgaagggctatctcatactatcatggtccaaaaaaaaaaaaaaaaaaaaaaaaaaaagcggccgctct

SEQ ID NO: 11121 - DNA, 376 bp, Triticum aestivum
  Clone ID: LIB31-031-Q1-E1-E2
ccacacattatgttcccctttgaaaggttcatgggagtcctaaagaaatatgtctgtaaccgcgctaggctagaaggaagcatctccatgggccatcaaacagatgatgtcattgggttttgtgttgacttcaatcgtggccttaacaagataggtctccctaaatcgcggtatgaggggagactgactggaaaacgcacgctaggatcggactcaatattattcacggatcggcactcttggtctcaagcacactacacagttctacggaactctaccttggtgatcccgtatgtcgatgaccacaagaacagtctgcgctccatacacccagactagtgcgatgactggattacatgtgaacacatcaggactt

SEQ ID NO: 11122 - DNA, 384 bp, Triticum aestivum
  Clone ID: LIB31-031-Q1-E1-E4
cggacctcgtcaacaacctcgggaccatcgccaggtcggggaccaaggagttcatggaggccctcgccgccggcgccgacgtgtccatgattgggcagtttggtgtcggtttctactccgcctacctcgtcgccgagagggttgtcgtcaccaccaagcacaacgacgacgagcagtacgtgtgggagtcccaggccggtggctccttcaccgtcactcgtgatacgtctggggagcagctcggcaggggtaccaagatggtcctctacctcaaggacgaccagatggaataccttgaggagcgccgcatcaaggatctagttaagaagcactctgagtttatcagctaccccatctccctgtggactgagaagaccactgaga

SEQ ID NO: 11123 - DNA, 372 bp, Triticum aestivum
  Clone ID: LIB31-031-Q1-E1-E9
tccgggtccacgaggtcatcgacatcgactaggcgtagcgccagaggcagtttgagcttgacaagatccggcaggagctcaacaagaccagcaaggagatcggcaagctcaaggccaaaaagcaggatgcaacggagctgatacagagcacagaggagattaagaggaggctggccgccaaggagaaggaggtggaggaggcaaagaccaccctcgatgccaagctcgtcaccattggcaacctcgtgcatgaatctgtgcccatcagcggcgacgaggcaaacaatgctattgtccggacatggggagagaggagactggaggagaacttgaagaatcatgtggatctttgcataatgcttgacattgcat

SEQ ID NO: 11124 - DNA, 323 bp, Triticum aestivum
  Clone ID: LIB31-031-Q1-E1-F10
tccggggccacgggcttcaggcaaatgggacgacaaaaagatgaagatccaaccctgggtgcatgatgcggcttgaagctacgtcattatttccccaaagaggaagggatgatgcaggacatcagcggtaggtatttccctcagtgatgaaactgaggttatcgaaccagtaggagaaccaagcaacacaacgtaaacagcccctgcacacagataacaaatcctcgcaacccgacgtggtaaaggggttgtcaatccctttcagggaacgatgccagaaattggcacgtggacgggagaaagttgtaatagattgatagatc

SEQ ID NO: 11125 - DNA, 445 bp, Triticum aestivum
  Clone ID: LIB31-031-Q1-E1-F11
gtatggtccgtacatccgggtccacaaatttactcctagtggaaagctaaacaggtggccacttgggagagcttatcttcttcgccgtattgagaatggtatcctgtacaccgaagagcgatatggctaacagcgaaactctttgtttcatccatttgagtagaattaatacgtatcatgctagtgtaattagaaagagttcgggttcatgtggttgattggagacaacttaattttagcaggcattttctgcggggacaacttcggcaaattgaacaatggctaaattgaccaacatggggtttgaacctaattcaatccaataacccttttggggggtaaattataaggtttgcaaaagaaccatgcttgcaaaaatgtatctcgattggatgattgtatcctcgactcatagtggttaaccaacctagtgtggttttagtcc

SEQ ID NO: 11126 - DNA, 403 bp, Triticum aestivum
  Clone ID: LIB31-031-Q1-E1-F12
gcgggtccactgccaccagagcaatatccatcatcacatcgaaagacggtgagattttacagtttttcgtagtttagatcgagtctgttcttcatacctacagtccacgaaaaaatgaaattagggttagttcatcatatccgaaccaatctgagcctttgcataatctttttagggttttgctttgttgaatttgcggttgcatcgtcgtgtctagttgctggtcttagcgttagtcttttagagtttcgagttctggtcataagttgtcacgccgccaccgcaccatcatcatcgcccctgtcacctaccaccaccgctctattaatttccaccacgtgctatgcactgttcattgtcataatcatagttgaggtcattcacatcttcacctgattcaatc

SEQ ID NO: 11127 - DNA, 405 bp, Triticum aestivum
  Clone ID: LIB31-031-Q1-E1-F2
ttccccaaaattgatccttggaaaatttgaaaaggggacaacctcaaccccggggtccccgaaaccctggatttgctgcaaaaattgggcaagaacagtaaatcttgtgtatcaaaccaattcctatagacagtcgacgatggcgtgtattcatttggaattcacaagacttggccttgaagttcccgaagaagagatgttcacgtcatcatttgcatcagccaggttcttgaagtaaaagaatttgtctccataaaagagcgtttacgtcgttggtgatgatggcattttggacgagctcaagttagatggccttgactgtcatggtggtcccgaggatggcatgacaaacatacggttggaggcaaacatctacttccaccaggatacgagtgttcgaactgt

SEQ ID NO: 11128 - DNA, 427 bp, Triticum aestivum
  Clone ID: LIB31-031-Q1-E1-F3
accttggcatgaattggcaagcataacaaaatgttgcccccaatgcaatgtgttgcctgccagttagaacaaaacgcccttgccttggaaagggaaacttcatattggctgcaaaacccaacctaagaggcggccggcaggagctgcagaagcagcacacaccaacagcaagccgaggcaacttgggaagcggaggcggcaataatgacttgctgaccacggggcagtctgccaaagcataaatcccattcttctcataagctatagccatgaccaaagacgacatcgcaacgtgcccctccctcctatgcctcaaatcgtgtaccagcgagagactgtaccagtgtagagaagcccttgcgaaactattatttagttagaaggctgattgctgatgaacattgattttaactataaacatatatat

SEQ ID NO: 11129 - DNA, 445 bp, Triticum aestivum
  Clone ID: LIB31-031-Q1-E1-F4
gtcgacgccctcctctaaaatggctatggggaaatttggaaaggggacaagctcatccaaggggtccccgagacgctggagttgctgcgaaaattgggcaagaaattagtttttgtaacaaacaattctaggaagtcgagaacgcagtattcaaagaaattcaaaacacttggccttgaagttcccgaggaagagatcttcacgtcatcatttgcagcagccatgttcttgaagttaaataatttttctccagaaaagaaggtttatgttgttggtgaggatggcattttggacgagctcaagttacctggctttgaatgttttggtggtccagaggatggcaagaaaaacataatgttggaggcaaacttctacttcgaccacgacaaaagtgttggagctgtcgttgttggacttgatcagtacttcaactattacaaaatgc

SEQ ID NO: 11130 - DNA, 225 bp, Triticum aestivum
  Clone ID: LIB31-031-Q1-E1-F9
tccgggtgcacaagatcctgcagacgcatcgaatccacaacactcgctttgaggcgcacttcatgatacatgggatgcttggtaccactcgtggcctatattcaacggctgggtgcaacagttgcggtaatcaatgaggcgattctggtgcacgcggtgctgtttgacactcagttcagttgaggcagccggtaatgttgttgcggatccatgtcaagctcgatg

SEQ ID NO: 11131 - DNA, 403 bp, Triticum aestivum
  Clone ID: LIB31-031-Q1-E1-G11
gggtccactcccacagcaaaagatagtcaccatctcatcaaaacatcgggacaccttcgcctctatcaagtggtatcagattcccaggttgctcggtgagattttacagttttttgtagtttagatcgagtctgttcttcatacctatagtccacgaaaaagccgaaaaaattagtgttagttcatcccatccgaaccaatctgagactttgcataatcttttctgtatctgctttgttgaatttgcggtcgcatcgtcgtgtcaagttgctggtcttagcatctagtcctttagagtttcgagttctgttcacaggttgtcacgtcgccgctgccatatatcaccaccgcatcatcatcatcgttgctgccatataccaccaccgcgccaacttcatcaccg

SEQ ID NO: 11132 - DNA, 449 bp, Triticum aestivum
  unsure at all n locations
  Clone ID: LIB31-031-Q1-E1-G12
cgcctgccggtattggtccgagcatcncgggtcaacatgttccgataatgtaaaagttcagcaattggacacaattgcaatcgagtaataatgcttgcagttgcaactgtagatatggacatgcaactggcctataaaaattgtaccggcccttgttgcagtcacattgagggacatgtagttgtagttgggttgcaacacttgtggttgcaagtccaatggtggacataataacaccccctattggcctaattgcagcttcattggggccatgcaattgcagtcgggttacaaacacttatagttgcaattctaagtaggttgacgtataactagctgacaacccccgtttggacccagttgtagttgcattggggcatgaacttgcagtcgggttgcaattcttgcaattacaagtctagtgatgggcatgcaactggcaacaacca

SEQ ID NO: 11133 - DNA, 410 bp, Triticum aestivum
  Clone ID: LIB31-031-Q1-E1-G2
actaaaatgagtcggatgatatgcacatcattggtaaaattccttacctgcaccataaatcagggcgatgggtcgtgccaaggcgatcgacaacgcagctctagaaaaaattccggcgctatgggatgaatttggtgttctaaagaaagatagtgcccagatgcaaaatcaagtgtccaagctgcaagaagatgtacaagccattagttccaagcaaggagagattccagcaactgttggaatagtggaacaggtagttctggatttgggtaagcaattatcaggcatcaataatgttctcctgacattagtgaaatcaactcagcaagggctgcaagctgatcacccttccagttctcgtgaagtggccagatctcctactcttcatcaagagcaaacacaagaacaag

SEQ ID NO: 11134 - DNA, 164 bp, Triticum aestivum
  unsure at all n locations
  Clone ID: LIB31-031-Q1-E1-G3
tggtcaagatggccgagctcaatggccatacttcccgtgtcctcttcatggctcaaagccctgatggttgcacngtggcatccgctgcagcagacgagaccctgcgcttttggaatgtgtttcctgatgctccgaagtctgcattgaaagagaagacttcacag

SEQ ID NO: 11135 - DNA, 354 bp, Triticum aestivum
  unsure at all n locations
  Clone ID: LIB31-031-Q1-E1-G4
gtgtcgtcaagctgtcattgttggaatttgtttctctctcgttcttcttgttttatctttatgcttcatttgttgttcaccccagcaatacggtgatgattgctttgtaatacaaagtgggaggaaaccctattttgaaagaatggcttgcctggtcaccgtccgtcgaggcgagagattagcttggcccgagagctcaaaatcgaaagcctaggcatgcgcctgttgcagcctggatgctactcggtcgtttcaaaaagaaggaacttatagatgaggagcgaggtgcaaccaaaaagctgcgtcccgtccgacaagatgaaccggcaactccttgtcnctgggcgacacaga

SEQ ID NO: 11136 - DNA, 426 bp, Triticum aestivum
  Clone ID: LIB31-031-Q1-E1-H1
taaaatgagtcgtagtatacattctcaaatgcattatcaagcccggtccgcaggagcctccagacgtatcacttaacccaaggtgctggtaatggacgacggaacactgaagcaaactcagccgggcaaaaccgagaggccaactctgcaagctccaatgacacctccatggacatggtttcagacagcgcaggaaatgggtactactaagtcagtttgtggaaacatgttgcatgcacaaccaggaagcgtcgagtgccagtattttctctggtttttgtatgttatgtatttttcctaaagctcatgcactgtgtggctttatagttgcacacctggcaattcacttaaaagttattggatttgttttgttttgttcaagcctgtttggagagaaatctatatgtatgcctggttcatgtcttg

SEQ ID NO: 11137 - DNA, 336 bp, Triticum aestivum
  Clone ID: LIB31-031-Q1-E1-H10
ccgggtcacatctttcagcaacactgatggttacaacttcacgtctcttcatgatcagcttcagctgtaatttggttccagcctatgcaaccgaaacttcaacttgcaagttgtccatgtatatggctagtcaagccatagtatatacctatatttgtcaggctgatcatgctagagagtaaactacgatcaaatagtcggtttcatgtaaccaatttatccagcatatcctatggagtaagtaccaaaaatattatttcagacaattattggaagatctcaaacttctgaagaaaatgctgttaaaccttctcagctaatatcttattgtttccc

SEQ ID NO: 11138 - DNA, 381 bp, Triticum aestivum
  Clone ID: LIB31-031-Q1-E1-H11
gggtccactccatttaatgcgatatttttgtactactcttttgcaaacactcctagctccttgagcatccatggcaaccatgatggtgacattgtggaaactgccaacataactagaatggcaactgccaacataacgagatggcaactgccaacataactagatggcaactgccaacataactagttggcaactaacagaaatacatggcaactctttcctttcttcatgccctccaacttgatgattgaaggaacatacgttaccttcttttttgcaaaataccatgatggcacctgattttttttattttaaaattgttgtacatcagcacatttacgtcgatcgtcgtgatcaacccactgtggactttactgagat

SEQ ID NO: 11139 - DNA, 361 bp, Triticum aestivum
  unsure at all n locations
  Clone ID: LIB31-031-Q1-E1-H12
cgggtcgacgccgtcgagaaaacgcctgctgcgggacttcaagcggctgcagcatgacccaccggccgggatcagcggcgcgccgcacgacaacaacatcatgctctggaacgccgtcatcttcgggccggatgatacgccatgggacggaggcacgttcaagcttaccttgcagtttacagaagattaccccaacaagccgccaactgttcgttttgtctctaggatgtttcacccaaatatttatgcagatgggagcatctgcttggatattctacagaatcagtggagccctatatatgacgttgctgccatattgacttctattcagtccttgctgtgtgatccnaaacccaactct

SEQ ID NO: 11140 - DNA, 391 bp, Triticum aestivum
  Clone ID: LIB31-031-Q1-E1-H3
ttacccccttgtgggatgttcaattttgcacctgcttgtatgacatgggagctggctgagtcgggagtacattttatcactacagtcatcaatggagctgatttggtgccaacattttcggcagcggcagtagatgatcttcgttcagaggtgacggcatctgcctggctgaatgatctccgtcaccaaatcgagcaaactagaatcctgagcactttctatcgatctgcatctgccttgggatcgcgacttccttctatggcaaatgctaaagctagagtagctggtgctggtgccatcctaagacctgtatctaatgggacacaggttgtaatgaggagagctcacagtgtagcacaagcagcgtggacaagaccggggctacaactat

SEQ ID NO: 11141 - DNA, 411 bp, Triticum aestivum
  Clone ID: LIB31-031-Q1-E1-H4
gtcgagggccgaggatacagtgtaaagggggtagtaacacaatcccaaatggaattttcaaacctaaggaacttaaggatggtacggttgcttggttggctgcttgtttggctgctgctgttgcggatccatcttctgagcctcgctcatatcaggctgccccgcgcattccacattggcgagaggctatggagcaagagtttcatgctctccttcgtaacaagacatggactctcattcctcccccaccacgggtaaatattattgactcaaaatgggtattcaaagtgaagaagcattcggatggatctattgagcgttacaaagcgcgacttgttgctcgcggttttcggcagcgccatggtcttgactatgaggacaccttcagtcctgtcgtcaagcctaacacta

SEQ ID NO: 11142 - DNA, 410 bp, Triticum aestivum
  Clone ID: LIB31-031-Q1-E1-H6
gtctctcgctcactcaaaaaaaatattccttggatctccttcgacgtgcgggaatgctgaagtgtaaatctgttggtgtgcttcttactcctgatgatgctacagagtatcgcagtattgttggtggcctacaatacctcactatcactcgaccggatctttcctttgcagttaaccgtttctgggaattacctcaaggcccttcttgacacacattggtctgcatttaagcacattctgcattgcgttcgtctcactgtcttttttggtttacaccttcggcctgcttcgtctatggtgttgtctgccttttctgacgcggattgggcaaggagtccggatgataggcgatccacggggggatatgccgtgttctttggtccaaatttgatcgcctggaatgctcgaaa

SEQ ID NO: 11143 - DNA, 432 bp, Triticum aestivum
  Clone ID: LIB31-031-Q1-E1-H8
cgatacactctaaagggggtcgtattaccttgtcacatgggccaccccaagactgagtgaagataaggttaggcaatgtgttgactcaagacttggaggggactatcctcctaaggctgttgcaaagtttgcagccgtcgctgcattgtgcgtccaatacgaagccgacttccggccaaacatgagcatcgtcgtcaaggcgctccaacccctgctgaacgcgcgagcagcccaccccggggctgaacacgctggacgctaagctgcactccggccttttgtatgatataatagataaggaaaaatgagccatcaattgttgttcttgcggggcatgtggcaggcggtttttgtacatttgtgattaatcttcccaagttgtaaccctcgagattctagtaccagaaatatttgattctttgtatccggtgc

SEQ ID NO: 11144 - DNA, 317 bp, Triticum aestivum
  Clone ID: LIB31-031-Q1-E1-H9
tccgggtccacggcggagatgaaaacgcgatggcgtccgggtggggcatcagcgggaacaatgggcggtgctacgacttctggctggccttcagctcgtgcatgggccgctgccgctaggcctccgactgcaggctcctccgcgaggactagctctagtgactccatgactccaaggagttccaaagcatgaacaggatctacaaggaggaccatcgtcagtcaagatctgctgctcgcaaggccaacgacgaagccctaggaactcctgctgttgcagctcaccactatcatccattttcgatttttttcatatgc

SEQ ID NO: 11145 - DNA, 439 bp, Triticum aestivum
  Clone ID: LIB31-032-Q1-E1-A1
cgcgggtcgacgatgctcacgacaatgatgcatatgcaggtgggattggacgcgaagaacgagctctgtgcaagctgcatggattatcatctagcatgacgatgacctgccgctgggagcagtcgagaccggaccaaagtgcccagcgggcctgtccccctgaaccggaccggcgaggcgaaagctcggtcagggtgagggatctagcgatggcgagggagcgctagctgcgtgtgtgtgtgtgtgtgtgtgtgtgttgtgcctttgtgcgtgcccagagtggttgcgtgcgtttgtgccatgccctatcctaaagagcaaatcctccggatgcttgttgcagacaaagaggcagtccatctatggtagcatctcatcttggggaactctgccgcccggcggcactgtcaccacatactactatgtacgtacatcgttg

SEQ ID NO: 11146 - DNA, 437 bp, Triticum aestivum
  Clone ID: LIB31-032-Q1-E1-A12
gcgggtcgacacgccaccctagattcagtcgtataagcaatacaactaccaccagcaagcaaactctcttggggcatgctgatggcaggaaacatagggcaaaagcaaaagcctttcatgcttctcagaagcaagaaaatggagctgaacaaactccaagcgacaaggaaactggtggagcaccaacaacagcatctacagaactaaatgacgggaagggtgctgacagtgaaagagatgctgacgaggacgttgtgacgagaaagagaacagatagcacaacctcggaggagccagataatgcaaaaagacaaaatttatcgaacttgaagactggtgaggcgacacaatctgaaaatggagaagcggaactcaaaacacagagcaaaagtgctgcagaagaactggtcaatgatgccaatcatcaagatattaag

SEQ ID NO: 11147 - DNA, 442 bp, Triticum aestivum
  Clone ID: LIB31-032-Q1-E1-A3
cggcgtcaacgccagcgccaccactctcaagagtcttaaagcctcactcctctccttccaccacctctccacacacaccatctctgtcagacatggcgccttccgcgacctgccgtctccactccatggcatccgtctcccgcgctctccgcccgcgcccgcgtctcgccgctcctcgtctcggatgcggactgagagttggatgctctgtgccagcatatggaagtgctgccacggagaaggcctagtggggattggccattgcgccctcacgagcgaccactcttgttccggttgtcaggagccgtcaaattttctgcaacgcagaagcttacatttctagtaacctgccagcgagcaagcctactggagcaagccagtacgagaaaatcgttgcgctactcactactcttttccctgtctgggtcatattacgtacagt

SEQ ID NO: 11148 - DNA, 403 bp, Triticum aestivum
  Clone ID: LIB31-032-Q1-E1-A8
attcgccggtcgacacctgaatctcgggacgagattctgtcaagtgggggcgagttgtcacatccctagtctggtatgacctaggctagctagctatttgtgcatcacatttaaatttcatttaaatttgaaatgaggattggtggaaccctcagaatcatttttgaaaatgacccaaataaaaatttctccaaaatggtccaagaagatgctcatgttgccctctgaccatattggacagagatagaaatccatgcaatatttttaggagctcatggacatttactttggccatttggacaaattcgataaatatttgcattggtaatataattctatatatatgaaatatggcccacaccttatgccatttatcaaatagctctggaataatatatccagc

SEQ ID NO: 11149 - DNA, 439 bp, Triticum aestivum
  Clone ID: LIB31-032-Q1-E1-A9
gggtcgacgttcacataacaccactagaggctagacaacatacatctcatcaaaatatcgaacgaatacccaattcacatgactactaatagcaagacttctcccttgtcctcagaaacaaatgtaactactcacaaagcatattcatgttcataatcagaggggtaataatgtgaataaaggatctgaacatacgatcttccaccaaataaaccaactagcatcaactacaaggagtaatcaacactactagcaacctactagcaccaatcctggacttggggacaagaattggatacaagagattaactagggtttggagatgagatggtgctggtgaagatgttggtggagattgccctctcccgatgagaggagcgttggtgatgacgatggtgatgatttccccctccgggagggaagtgtccgcgacagaata

SEQ ID NO: 11150 - DNA, 412 bp, Triticum aestivum
  Clone ID: LIB31-032-Q1-E1-B1
gatcatggtgcggctcaagaaactcagctatgggcacttcgacaagagcactatgacccgtgctcgtcgcgcagaaggtctgcgtagaaggtctgcgtcagggtatacatgggtgtcaccaccagccagctcgacgagctcgccgccgagaccgccgccgcactcaccgcctcccagcctgactatgcctctcttgcggcgaggattgttgtgtccaacctgccgccaagtggaaatagtctgtgtggcgctcataaataaagagcattcttgtagaaagctgagggacgaggttcgtaaccgagagtcatgtgcagagctggaggaagaagttgcgaggcttggaactctccttgtgaaaggctcaaggacagcagtgaggacaatgcctctttagttgtaattgtgatac

SEQ ID NO: 11151 - DNA, 446 bp, Triticum aestivum
  Clone ID: LIB31-032-Q1-E1-B2
gggtcgactccaccaaatcgatagatatcatctcatccaaagatcgggacacctttgcctctatcaagtggtatcagttttcaggttgctcggtgagaatttccagtttcgcctagattagatttattttcttacctattgtccaagaaaaagccacaaaaaagttagatctattcatccttttgtccaagccagtctgagcctttgcaattttctattcattgcttgcatgattgaattatcggttgcatcatcgtgtcgagttgctggtcttatggtctagttcgtttagagtttcgagttctgttcacattagtcacgtcgccgctgcatcgttatcccttctgctgtccaacacaccatccatcaaattccaccacgtgctacccatagttcattgtcacaatcatagttgaggtcgttcacatcttcgcttgatccaatct

SEQ ID NO: 11152 - DNA, 439 bp, Triticum aestivum
  Clone ID: LIB31-032-Q1-E1-B3
gggtccacgcacagaagggaattgagactttatctatttcacttataatttgaatttgaattcaaagtggaatttgatatcagatatggctcaaaggtgaccaagcactgtttagcaaaatgaattagcttaattaaagagggttactgtacctcattacataggggtgttacacctccacaaccttattcgccgtcagcagcactgcagcataaaccctagctctcctctcactccttcacttccacttccatggcatggccgtacaacattactgttcgtgaaatggaacttctcaccatttgtgatatcccggcgccactggacacgcgcctgtcagtgggatggattctgagtgctgaggtcttcttgtggtgcctactccccatcggtatcgttgcctttgcgcacctcgtttgtatgtttcgggcacgtctga

SEQ ID NO: 11153 - DNA, 450 bp, Triticum aestivum
  Clone ID: LIB31-032-Q1-E1-B4
gggtccactccataaacggaattgagagccggtctgtgaaaaaatgggcatctgcatccagcagctcaagcaacagcatttcattgggcacttacagttcttttcatatctatggcaccatagatactgacagctgggtgaggccacacctgcagcatgatggctcatgtttgctgctgcaagcatacgatgatgacattgacaaaatctgctatgtgatgaatgacctagcacgtggtggtgtcgatggctctgctgatcgtatcatggatgacacgccttactcgaatggcatccatgatttcatgattttgccagcaggcaagaatggggagatcaagaagcagctaaccatctatcaagaactcgagcagtacttctcaaaactcatgctttagcgtgaccgtaacagacaatttgctgccttggaaatgttgaaaaatgttctgc

SEQ ID NO: 11154 - DNA, 427 bp, Triticum aestivum
  Clone ID: LIB31-032-Q1-E1-C11
gggtcgacactccacgacacagtcatcagacttaaattctttcgcatccagtcggagtttgcggaaatcatctatcaagatgtccttcgtacctcggggcaattctacctcagaaatcaactgtccaacagtgacatcgacacaatgctacgaatgcaggctgacaacgaccgttatttcatgactcccacgatagacggcggcttcatccacgctccggtcccttgagtcgagtcgaaagaagtgatgatgtgtctagttctgaaacatcgattggctcatgttgtaattaaactttaatgaacttgtagtatgcctctttggtttcgagagtcgttcaacttagatgtaatcgatgctattaatgtcttgcttttctcttccgatcgttctgttgcatacttatatattgcttatgtattgtctg

SEQ ID NO: 11155 - DNA, 396 bp, Triticum aestivum
  Clone ID: LIB31-032-Q1-E1-C12
tttgggtgctagtgtttccacgattccaaaaactttgtgtaatgtgctaggtttccgtcaatttgatgattgttctttgaatttgcatctcgcggattccaccattaagaaacctatgggaaggattaatgatgttcttattgttgcaaataggaattttctgcccatacattttattgtccttgatatagatttcaatccgacatgtcctattattcttggtagacctttccttagaacggttggtgcaattattgatatgaaagaaggaaatattatattacaatttccattaaggaaaggcatggaacactttcctaggaagaaaattaaattaccttatgaatctattatgagagtcacttatggattgcataccaaagatgacaataccta

SEQ ID NO: 11156 - DNA, 425 bp, Triticum aestivum
  Clone ID: LIB31-032-Q1-E1-C3
ggtcacccgagagccacgtcacgagcgcaacttcaacggttgctacaaaaagtaatggtgcccgccgtgcctcgtggcgcatcatttcctccatcgagcagaatgaagagagccgtggcaatgaggaccgtgtcacactcatcaaggactaccgtggaaagattgaggttgagctcactaagatctgtgatggtatcctcaagcttcttgattcccaccttgtcccctcatccactgctccagagtccaaggtcttctacctaaagatgaacggtgattactacaggtaccttgcggagttcaagagtggaactgagaggaaggatgctgctgagaacaccatggtggcatacaaagctgctcaggagattgcactgaaagagctgcccccgactcatcctattaggcttgggctggcactcaac

SEQ ID NO: 11157 - DNA, 450 bp, Triticum aestivum
  Clone ID: LIB31-032-Q1-E1-D1
gggtcgactttgcatcttttggcatcaatattatgaatactagatgatatctcacgcattgctgcgggaactcttggtcatatgcacaaggtaatacataaatggaataactttgtttacatgatagatatatgatcttaagatgaaaacagtgcaattgacacaatattgggaataagtaatcccgtatgacttgcataagatgagcaccaagatccaaatccatgtggttgaagacaacaaacacatgcaagcaactaatcaaaaatgatataagatattcttctgacatacttgcttagtgatgattgttttttcatctattaaagccactggataatggagctcacatgagaatattcatgaaaaggactaattttatttatgcaaattggtaagaacatgatttaatattatgcattccatttgttattttaccagaaatttgct

SEQ ID NO: 11158 - DNA, 401 bp, Triticum aestivum
  Clone ID: LIB31-032-Q1-E1-D12
actcgcgggtcgacagtacactggataatgagtcgtattacacgcgggtcgatctgacatacaggtcgaggagaacaatgtgtgctgccactgcgagcatgcatgaaccagtcaaagatctgtcggcagcatgtaatgaatgaagtcatcagatgtccaacactagcatgcatggaaggaagccatgatcttagcatgcttttattttgcgtctgattaaaactctggtgtatcaatatgctgctgctttggtgttaccttggattcaacttctgacaagagctctgatgcatgaacatgttactgactttggtgccattttcagttcatgcttcttcttaaatgttcgagtgttctccttcttgcagtggattttcgttctgtatgatacctgctgagtg

SEQ ID NO: 11159 - DNA, 448 bp, Triticum aestivum
  Clone ID: LIB31-032-Q1-E1-D2
gggtccacgtcctccagcctccacctgtgactgttcatccacgggctcctgttcatccagcctccaccgcacgctaatccaccggctactgttcaaccagccttctccacgagctcctgttcaaccacccctccacgggctactgttcatcctgccctccaccatctactgttcatcctgccctccacggggtggtcctgttcatccagccctccacggggtcctgttcatccagccccaaccggctcgatcgatcgaggtcctgttcatccagaggcaacaccacggggtcttgttcatccacccccaccaggaactgttcatccaaaccccccgcaacgctcactgttcatccagaggtagcatcgatcggcttcagttagcagcagtagccaaggaatcgctcgatcgggttcagttaacagccatcgatcgatcgctcgggttc

SEQ ID NO: 11160 - DNA, 455 bp, Triticum aestivum
  unsure at all n locations
  Clone ID: LIB31-032-Q1-E1-D4
cgggtcgacacatggactaaaatccttgcggccaaaaagcataaactcaaacgcccccccgaaagctacccaaaccgcaggttgttaccctgattagaggaggaagcacttgacgcggccgaccggccacctcgtggccgcgacagagaggcctgtcggccctccacttaagccgcaccccgtaccaaggtacgggaatatgcgccggacttacgagatatgttggaggacaaggcaaggcaaacaagatcgatctacggatcacgtgggcgccccacggctcgagacggtaaccgtcacgccggccacgaattcggcagggccgaacacagtagacaaagctcattggagctacgtcgtgatatagcccagtacagaggcgccgcacacccactatgcttcacagacganataatggatcatcaaatccccgagggtttcaaacccgtaaacat

SEQ ID NO: 11161 - DNA, 449 bp, Triticum aestivum
  Clone ID: LIB31-032-Q1-E1-E1
gggtcgaccttcatacagggacttgtagatacccgtgccgttgctatggctttatgtggcaagggcatccacgtgatcatgaatcgtaagaaagagtatgacatgctcaagtcacagatgccagagaacagagcaagctacttgaagtgctccagcaatgacataaccaagatttggctagtatagaggatcgacgacaaagaacagaggatggcaccaaaaggaacagtgttcgttccaatatcgcagttcccccttaagaaagtccgcaaggactgcacttacttgagcactccggcgatgaagatcccggacactatgcagaacatccactcctgcgagaactggttgccgagaagggtgatgagcgcgtggcatatcgccggaatacttcatgtcctggaagggtggagcgagcacgagtgcggtgagcacatgatggactctga

SEQ ID NO: 11162 - DNA, 451 bp, Triticum aestivum
  Clone ID: LIB31-032-Q1-E1-E11
cacaagtccgagactcgcgggtcgacgatacccgatattcttacacttcttacgaatcggaacatcagaagataagcttgcggtaattttgtaaagttttggcatcggactgtttggaactttggatcggcagagagctagaggcctcggtgctctggaggatgttaaatttgagaacgcaaattgttgtcaaataactttgcttctctcatttgaagaatttagtattgttgggagcctttgggcaagctgttatctcttatctgaagttcccattttctcctctccccctttttggtttttgcctggttagcgatcaggtccaatcctctgggaattctcctgtgtgtacaaaaatggaaacagccttggcattgtttgttatcttttgctgggaagtttctccatcgctttgcaatctatagtgaagtggagcagaaaatggattgga

SEQ ID NO: 11163 - DNA, 449 bp, Triticum aestivum
  Clone ID: LIB31-032-Q1-E1-E3
cgggtccacacattacgctatagtgatacgtcatatgaatgttgatgcatgtttcaaatacttctgggagtagtagattatatctgtcctgccatatcatgttattagcatagaaaagtcagttttgctccatgtacttatggttatctaaaaaggctagtagcatttgtaagtgtgtgtttagttcctaccttcagaatatttttgtgtagactatgttcttgaccacatcatccttgttgttagttcatttgctatataaaagaaaataacaggtgtgatcaagtcaataggatattacttgcgagtgttttttctaagtattccctttctcttatgtttctcatgaactccttgagctttatgtggaacactcggtcaacaatatcagacctttctcctcgcaaaaaaaaaaaaaaaaaaaaaaaaaaaaaaaaagcggccgctct

SEQ ID NO: 11164 - DNA, 453 bp, Triticum aestivum
  Clone ID: LIB31-032-Q1-E1-E4
gggtcgacgaagctgaattactattgaataatatgttgattaatgaaaataatttgactcttcctgagccagttcctgaggcaattcctgaaccaattgaggcaactcctgagcctattcctaaacccactccaaagaagagaggtgttttatttctcagtcctgaagatatgcaagaggcaaagaaatcaatgaaagaaaaaggtattaaagctgaagatgttaagaatttaccacctattgaagaaatacatggtcttaatataccgcctattgaagaaccacattgtcttgataactcgacacaggtagtaaaggtaaattctctctatagatatgataaagttgaaatcccctctactaaatttcatagcccatgcttagatgaatttgatgactttatggctagacaagaaagttttaatgcttgtgttggtagagagttaaagaata

SEQ ID NO: 11165 - DNA, 432 bp, Triticum aestivum
  Clone ID: LIB31-032-Q1-E1-E9
gggtcgacacccttactgaaaagagaccagaggagctgttggattcattcctagaagatttcaaggccaatttgatagaggcacatgggtggccgaccggtggctcgtcagcgtacaaagtcgccaaagctgccctcaatgcttacacaaggattctcgccaagaagtaccctaggatgcgcatcaactgtttgacgcctggttatgtcaagagcgacatgtcgatgcacatgggagttttgacgcctgaggagggcgctagcaacccggtgaaggtcgctctcttgcccgacgatggcccgacgggtgcttattttgatagggatggcgtggcctcgtttgtgtgactctgtcgtacgtgtaatggtttcgtccggttttactttcagaatatgagacacctgtaactgtagttgtcaataaccattgtgc

SEQ ID NO: 11166 - DNA, 447 bp, Triticum aestivum
  Clone ID: LIB31-032-Q1-E1-F3
cgggtcgacatcaaaccatatactcatgccaagcatgcgatgaatgagatcaatgcagctgcaaaggataagggtggctgcaaacgagaatgcggccgctgagaagattgtccagatcaagcgtgccgagggtgaagcagaggccaagtacctgtctggcctcggtatcgcccgccagcgccaggccattgtggatggcctgaggggcaacgtcctgggcttctcagtcaatgtgcctggcaccactgcaaacgatgtgatggacatggtgctgatcacccagtacttcgatactatgaaagagattggcgcgtcctccaagtcctcggcggtgttcatcccccatggccctggtgcggtgcgcgacatcgccacgcagatccgtgacggtcttcttcaaggccagtctgcctctgacaactagcagtttgcttcgccggcatgaac

SEQ ID NO: 11167 - DNA, 431 bp, Triticum aestivum
  Clone ID: LIB31-032-Q1-E1-F4
gggtcgacactagcgggacgatcgttgggatcaaatgcaaagatggaattgtccttggtgtggagaagctgataacctcaaagatgatacttgccgggtcgaaccggagacttcattctgtgcaccggaactctggcttggctgtggctggattagcagcagacggtaggcagatagtctcaagagcaaagtcagaagcagccaattatgaaaaggtatacggagaacccatgcctgtaaaggaattagctgatcgcgttgctagctatgttcatctgtgtacactctactggtggctcaggccttttggccgtggagttattcttggaggctatgatagggatgggccacagctctacatgatcgaaccttcaggcctctcctataaatattttggtgctgctctgggtaaaggaagacaagctgcaaag

SEQ ID NO: 11168 - DNA, 415 bp, Triticum aestivum
  Clone ID: LIB31-032-Q1-E1-F5
tcgcgggtcgacagccatgttaatttagtttcgtcgatcagttaggccattaatttcgattagtcgtgagatattttgtaatcgagattgaaccatgtttgagtggaatgaataaatgattggtgtgattatgattgtgcagtcatatgggtagtgatattttctcaatagaccattgttctattctaattttctcatccactccaaaacaccagatgcctccgagacgtgaccccggtctcaacttcccgccggagctcacccagctgatccagcagcagaatgccctcatgcagatgctcatctagaaccagaacaacaagaacaacgatccaccgccaccaccccctgttgacaacttgactcgattcctaaggctgaatccgctagtgttctctagcagcactgatacgat

SEQ ID NO: 11169 - DNA, 436 bp, Triticum aestivum
  Clone ID: LIB31-032-Q1-E1-G12
cccgggtcgacacgacagaaggggctcatgctcttgctaaacttgtttctagaagttgggcgagtggctagggttagtgcatgatatcatatgtatttcagacactttgattcttaaataaagtccctagttaccctttaaagtatatacgtgaggcatagccgcgcctgttagttggagctaaaggaactgtagaggaggtttatgaggaaccgtcccagtgatgttttcgccaaaaataacgccccagtaatgttaaagatttgttttttaagcaacagtgatgatcgcttcactacttcttataaaacaacagagttggtgatgatggtgtgcctgccatcttgcaatatatgccgtctgatctatatctgacggttaggaaggaaaatatgacaattttgcaaaaaaatatctgcactcctctccacatttg

SEQ ID NO: 11170 - DNA, 445 bp, Triticum aestivum
  Clone ID: LIB31-032-Q1-E1-G2
gggtcgactttcccgtattgtaataagtgacgcacatgcaacacgtcacttgtcgcaaccggcgagttttcccttttttcgtagattcgtttattcaaaaaaaattatctcttaaatcgtgctccaaatcttgaaccgttttcaccattggattccttgcgtcaagatcttcaaaactagatcccatgttgatagattttaacgaactttttttccacaaaaaaccgaaaaaattgaaccagtagcacgtttttttctctttccgaatgaggcacacccgcgcctctcgcgacatcacaaccgtgcctctcgtgaaagcaaatccgtgactctcgtggaagaaaaaaaacagaaaacacgttttttttcgtttccgagaggtacggccgtgactctcgcgaaagcacaaccgtgcctctcgcgaaagcaaaaccgtgactctcgc

SEQ ID NO: 11171 - DNA, 452 bp, Triticum aestivum
  unsure at all n locations
  Clone ID: LIB31-032-Q1-E1-G4
cgggtcgacgttcacataacaccactagaggaaaagacancatacatctcatcaaaatatcaaacgaataccaagttcacatgactactaatagcaagacttcacccatgtcctcaggaacaaacgtaaccactcacaaagcatattcatgttcataatcagaggagtaataatatgcataaaggatctgaacatatgatcttccaccaagtaaatcaattagcatcaaatcatgcaagttagagtccaaaacaagggcaaaagtgtttggaaaagtagatacttggagacgtatcaactcccccaagcttaaaccttaccttgtcttcaagcaattcagttgataaactgaaagtgataaagaacaacttttataaactctgtttgctcttgttattgtaaacatgaaatgccagcattcaagttttagcaaatattatgaactaaccata

SEQ ID NO: 11172 - DNA, 411 bp, Triticum aestivum
  Clone ID: LIB31-032-Q1-E1-G6
ggggtgcttctacatctgttctccctcagcccgctgttgctgcaacccagccttgggttctggactctggagcttctttccatgtgacctctgatcactctcagcttgtgtcttgccagccagtgcgggatggtgcctctgttcagactgctgatggtacaccttgttctgttactcatcagggttctctttgcacatccaagttttctgttcctgccatctcctttgctctagagctgtccatgaatcttatgtctattggccagcttgctgatatgaactactttgttggttttgatgactcattttgttatgtgcaggaccgtcagagcaagagggtcattggaactggccatcgccgtagaggattcacatccctctacatccttgacaccttacaccttccttcag

SEQ ID NO: 11173 - DNA, 371 bp, Triticum aestivum
  Clone ID: LIB31-032-Q1-E1-G7
aagagcatggcttcatgagagagagttacctgaacgacggtatgagtacaaatatgtattggatggcaactgggtgtgcactgagcatgatatgatcaccaaacccaatgcggactgccatgtgaataactacatccaagttgccaaggatggtacgagcgatgaatagactgcgatgcaggagcggttgactgggccataccccgatccagcacaagacgacacgctgatcactaaagattacctggaacagtacaccgagcaataagagaacttcccttttggtgcgaccggctcgagatgcagccgggaacacctattgatgaaatgaaatgaaactagactacgcatctctgaaacgctgctgtgct

SEQ ID NO: 11174 - DNA, 425 bp, Triticum aestivum
  Clone ID: LIB31-032-Q1-E1-G9
ctcgcgggtcgacggtggtcactagctcaagtcgatgcactgctaccactccttccatcagcgatgcatcttcgactggcttcgccttaaccgcatctgccctgtctgccgcttcgcgctggccccacagtcagacgacgacagcaacaaggatctgggactgcctgagaaagtcgaatagctcgacagtttgccggaagttgaattgaagtgtgcagcccttgcaagccacgactgtgctagcaggttgtattcatcttcttttctgttatgttctgttttttattggattatcgatcaaaagcttgtagtttgaaccaaaattacttttttcagcttgaaaacttagtagatcttctctctgttatgtacaatacgagcaaaatttcatctttatgcatcaaaccttcattttctctaagaat

SEQ ID NO: 11175 - DNA, 388 bp, Triticum aestivum
  unsure at all n locations
  Clone ID: LIB31-032-Q1-E1-H11
cttgcacagctgatcaatgagaagccacaagtcatccaggagtacgagtcaggcaaggctatcccaaaccaacagatcatcggcaagctggaaagggctcttggcacaaagctgcgaggcaagaagtgaagctgcgtgcatctgacaggagtcgagtctttcaagaggggagcttggctgggcaagtttaccgctaaataaagcttgtctactaaatcatgcgacttaagaaaaccctggagtttggtatttcgctttggtttgggtgaatgtaattattagcttctgtgaacaactctgtatctgggtttcgtttcgtcagtgtgtcgtcgtgaatgtgaactcttctgaatgcctgaacctttatataacttgtctccacanaana

SEQ ID NO: 11176 - DNA, 471 bp, Triticum aestivum
  Clone ID: LIB31-032-Q1-E1-H2
tgcccgtgcaggtaccagtctagcgggtcgactccgaggagctcaccgtcgaggagcgcaaccttctatcggttgcttacaagaatgttattggtgcccgccgtgcctcgtggcgcatcatttcctccatcgagcagaaggaagagagccgtggcaatgaggaccgtgtcacactcatcaaggactaccgtggaaagattgaggttgagctcactaagatctgtgatggtatcctcaagcttcttgattcccaccttgtcccctcatccactgctccagagtccaaggtcttctacctaaagatgaagggtgattactacaggtaccttgcggagttcaagagtggaactgagaggaaggatgctgctgagaacaccatggtggcatacaaagctgctcaggagattgcactgaaagagctgcccccgactcatcctattaggcttgggctggcactcaacttctcggtgt

SEQ ID NO: 11177 - DNA, 459 bp, Triticum aestivum
  Clone ID: LIB31-032-Q1-E1-H4
ccggtccaagactagcgggtcgaggtcgtcaaacacctgagctttgccgactgcttgggttgtcacagaagatgccaggtgtcattggagttctggtggatagtgcaagaccaattgatgcaattaacttggcctacgcgtttggactcactgaacagtttgagccagtgcaattgctgaaagcatatctgagggaggtcaagaaggtgtcacatgccaagaatggaaaaatgtctcctggagcacagaatgagatgaatgagcgtgagctgtctgcactgaaagctgtgatcaagtgcgtcgaggagcacaaactggaggagcaatatccggtggacccacttcagaaaagggtgattcagctggagaaggccaaggcagacaagaggagggctgtcgaagccgccaagccacagtccaagaggccgcgtgccaacggatcgctctaatgcacccgtg

SEQ ID NO: 11178 - DNA, 411 bp, Triticum aestivum
  Clone ID: LIB31-043-Q1-E1-A3
tcctaaggtccacggccactccaaaaacaccggaggtgcctactactacgtgttgcccgctgacgatgaccagcagtagttaggaggatcccaggcaggaggcctgcgcctctttcgatctgtatcccagtttgtgctaaccttcttaaggcaaacttgtttaagttaggtctgtactcaaatattgttgcttccgctgatccgtctatcatcgagctcttgtattcgagccctcaaggcccctggcttgtaaaaaaatgcttgtacaacttattttaatttgtaaagttgtgttgtgaaaacttctcctgggtccctgattttgatcgtacacttttgcgtgtgataagaaaacggtcaaattagggggatcatagttttccaaaatcacccttggtggacaaacctttt

SEQ ID NO: 11179 - DNA, 434 bp, Triticum aestivum
  Clone ID: LIB31-043-Q1-E1-B1
ttcacgggtcgaccccaaagaggctctcaggacaagcaagcgcgagatgtcagtcgccacaagaggagttgagcgagagattggctccctgcaaatggaggagaagaagctggttgctgagatcaagaacactgccaagactggaaatgaggctgcaaccaaaattctagcccggcaactagtcaggcttaggcaacaaatcgtcaatttacaatgtacacgggcgcagatacgtggagtagctactcacacacaggcaatgtatgctggaacttcaatatctgctggaatgaaacgcgcaagcaaagcgatggcagcaatgaataagcaattggaaccaacgaagcagatgaagcagattagagaattccagaagcaatcatctcaattggacatgacgcttgagatgatgtctgatgccattgatgaaacac

SEQ ID NO: 11180 - DNA, 300 bp, Triticum aestivum
  Clone ID: LIB31-043-Q1-E1-B2
gtccacagccgccggacgatcgttgcgatcaaatgcaaagatggaattgtccttggtgtggagaagctgataacatcaaagatgatacttgctgggtcaaagcggagacttcattccgtgcacccaaactctggcttggctgtggctgggttaccagcagacggtaggcacatagtctcaagagcaaagtctgaagcatccaattatgaagaggtataccgagaacccaagcctgtaaaggaattaactgattgtgttgctagctatgttcaaccgtgtacactctactggtggctcagg

SEQ ID NO: 11181 - DNA, 391 bp, Triticum aestivum
  Clone ID: LIB31-043-Q1-E1-B3
ggtccaccgaaaggggaaataccgggcagggaagtcgtgaagaagctccctcttatgtttaattatagtttttagttgttgaacttgtccaacgatgaactggggtgatctattggatgatataaaatgggtttatgtgcatttcgttgtccgtttgatgttgatttctccgttcgttgtttgatcacgtagagtagttcatcacgttgcatgcgtagtatggatatagggtgccagatatgatatacgcaaatatgaagagaaaaatttaaagtgtgaccagtcagtgccagtggacacgtccggacacgtccacaaaagtttgaggagttcgatttgctgtctgcggttgtaaatgctcttaggaccctgtgggagccgtaagtgcacg

SEQ ID NO: 11182 - DNA, 389 bp, Triticum aestivum
  Clone ID: LIB31-043-Q1-E1-B5
gatggcaatgaggtgttctttcgcatcaagagatctacccagctgaagaagctgatgaatgcctactgcgaccgccagtctgtggatatgaaagctatcgcgttcctgtttgacggtcgcaggctccgtgccgagcagaccccagatgagcttgagatggaagatggcgacgagatcgacgccatgctccaccagactggaggctgccgtctccctccaagcgcctacaagaagccgtcgaaagtcctgctcgttgtcggtctacaagactctgatccatcagtaaagagcacatgaacgaatgaaagtctaaaaaaaacttgtgaaggtctggccccatgccatagctgaaggacattatggggggcttttgtttagtgccgtttggg

SEQ ID NO: 11183 - DNA, 438 bp, Triticum aestivum
  Clone ID: LIB31-043-Q1-E1-C2
ttcacgggtcgacaacctctacatttcacacatccaggtgaaccaagcccaaaagcagaggcgccgtacataccgtgctcacggacgcatcaatccttacatgtccaacccctgccacattgagctgatcttgtcagagaaggaagagcctgtgaagaaggaggctgataacgtcgtcgcaccaaggaaagctatctaagctaccggaatggatgcattcgtccaacagtcttagttgtagttcttctcaagtacctttgttggcagtgtttgttgcctccttgatgtttttgttaccaacattgagtaaggatttgttaaggttgatgctaaccttgtgattgcgagtggtctttatatgctaaaacagtttcagatatttgagcattagcacaccagaacttatttctcagagatgctggtcctttcgggctcttc

SEQ ID NO: 11184 - DNA, 430 bp, Triticum aestivum
  Clone ID: LIB31-043-Q1-E1-C4
gtccacaatgcccatgccactgaagcgactaagaagcgaccgtgctcggctgggttaaggcttgcactcaaaaacgtgatgccaagcctcgcggcagccttcaccgagatcggcgccgaggggtgtgaagagttccagttgctgcaaatcaagttgccatgtgctctcagcaccactcactacacagagtagttgcgggtatacgatattttgtgatcctggtggtgttgtgataatcatgcacatttttgtcctacaacaattagatactcctttttgctttaattccccatcaggagagatattgtcgtagagtaatcagttatctatcaacatacatgtaaaggctgggtagagatttgtcaatgtgatacatcagtagaatataacctatttttcagaaagaagataatctacatatatagaagtg

SEQ ID NO: 11185 - DNA, 251 bp, Triticum aestivum
  Clone ID: LIB31-043-Q1-E1-D3
gtccacgtgccctattatacaggaatctactcgatctccaattgctgtgggggggggggggactatttgtatcatcccatcggtcgattcactgtcaagtgcgaaaatgtgtgcactttgtgatctctgacccttaccgggaaagtctcacttgagtgttttgacgttgcgaaagtctctagcaatgagcgtatatctcaccaagcctgtgctgtcactacatctaaagaatgtccgtcgctttgtcggat

SEQ ID NO: 11186 - DNA, 309 bp, Triticum aestivum
  Clone ID: LIB31-043-Q1-E1-E1
gtccacatcggcaggaacatcatccatggaagcgactcagttgagagtgcgaggaaggagatcgccctgtggttccctgagggcattgcagagtggaggagcagctagcacaactggatctatgaggcctaagatgtgtcatgagtggttgagtgcaggtttcattaagcatctaccaaactagtctttggttgtttacagttttgagatttgtatcttgggaaccttgtttgtgtgaactgaagttatctccttgtgcttgggcatccaagcggtatctgctgctctatatttgatatatggtattgc

SEQ ID NO: 11187 - DNA, 301 bp, Triticum aestivum
  Clone ID: LIB31-043-Q1-E1-F2
ggtcgacgttcatggagtctacgaatactgggaggagtgtcggagacaggttcaccgattcagcggtaacagttacaaagggtacaccactacggccgaggccgaatctagatacacccgctatctagcgggagaggggagggagcgttggaggaaccggatgaagatgagtttcatcgtgatgatgctcatcgttatgaccgcagctctcttctatgtcatggtagtttagatgatcgagatcgacttgtaatgtgaagacaaactccctactcgcggtcgtcagagttgttttataatg

SEQ ID NO: 11188 - DNA, 340 bp, Triticum aestivum
  Clone ID: LIB31-043-Q1-E1-F4
ttcacgggtcgactcccgcacgacactgacgtacctcgcgaacgagcttgtggacccattggtggaagagctgacccggagggtcaagctcgcgccggcgaactcgctgggagatctcctgctactgtgcttcgacgtgagcggggtacaaaacgggcaagtggtggcgatgatccctgacgtgacgctggtgctcggcggcggcgcgacggtcacgctaaaggcggagaacacgttcctggatgtgcatgacgggactctgtgcttggcggtggcggcggcgtctgagcacgatactcctgtgtccatcatccggaatagcgcgcagcagaacatgcac

SEQ ID NO: 11189 - DNA, 403 bp, Triticum aestivum
  Clone ID: LIB31-043-Q1-E1-F8
gaggtaaaggaaaggttcgcccatggctccgtcgcagcccaagtcgggcctcttcgtgggcatcaacaagggccacgtcgtcaccaagcgcgagctgccgccgcgcccgtccgaccgcaaggggaaaggtaccaagagggtgcatttcgtcaggaacttgatcagggaggtagctgggtttgctccgtatgagaagcgtatcactgagcttctcaaggttggcaaggacaagcgtgccctgaaggtggcgaagcgaaagttgggtacccacaagagggcgaagaagaagagagaggagatgtccagtgtcctcaggaagatgagatctgccggaactggaaccgagaagaagaaatagagcatcccaagctcatgaaattgatggcaatcttctgttctggtg

SEQ ID NO: 11190 - DNA, 207 bp, Triticum aestivum
  Clone ID: LIB31-043-Q1-E1-G8
ttcccgggtccatcctcagggtacgagaatatgggcggttatttcaccgcaaaaagggctgaagtcggaaacctcgggtggttaaaactcctccatagcgaagatggagccactccagacataacccccttagatcacctgtcaagagttattcacactagtatcaggggcaagtaaagggtttctcgggcgccaaccaaaagggct

SEQ ID NO: 11191 - DNA, 394 bp, Triticum aestivum
  Clone ID: LIB31-043-Q1-E1-H3
gtccactctctttttgcagccgagattggccatgttaatacataagacgaatcttctaatattggatcttttatgcgtaatatactggacaagataaggcttggagtccttgctgatccgctgggaaagaataagctgcatgaaatgctgatgaaaactcctggatttggagaagccgttgcaatttctaagctgatgcaaatcgtcgaactgcaagagagcaataaatttaggcgcatagttttggataccgcgggaactgggcatacactaaaccttttatccgctacaactttaatggagaagctccttggtatggccaataagggtgtgaatttaacgtcgtccttcgcagctcttaaatcaactttcgggaaagaccaaatagatcctg

SEQ ID NO: 11192 - DNA, 355 bp, Triticum aestivum
  Clone ID: LIB31-043-Q1-E1-H4
tccacggactatgctcttaagaatgctagctttcggcttcacccagtctgaggtacacatccggatgacccagtagtaacaaccgcagaggtgctccctttatgccctagccgaactaacgggaatgtagggcataataacaggagccaggcaacccaacttggccaaaacttaagtcatattgatgcatataatggcgaagaaaaggtatatatgagcaaaaacacatatgtgatgagcttgatcctcggagaataagcttctgtctgggaagcccccaagtatagtgggcgtacatgctcaaggatgtgtacatcacaggtgcacggtttagccatgcgaaagagtttaagtt

SEQ ID NO: 11193 - DNA, 464 bp, Triticum aestivum
  Clone ID: LIB31-044-Q1-E1-A1
gggtcgacgtatcacacgagacttctgcctagtaagtggatgacatctgtcccaacgatgagccaacacgtgtttcctctagccaatgatgattttacacgtggaaaatccccattggtcggggctgttaacgggttatcggatccaaaaccagacccgatagcataacggcgttccgttacggtggatgccacgtgtcggtcacccttgatgaaagcacttctgtgacgcgcgatttatcgtcatggaagtggacacttccgtgatgataattttggtaatgtcatggaacacttctacgacagcacaggtatgactatcttgattctgtcataaatttgtcatggatgtacatgcatgacaaaaaaacgcgacctactgtgacaaacacgtatcatcacgggaatgtaattttttggaattgaaagtcaaatcaacggttcgaacaacctattttttttttt

SEQ ID NO: 11194 - DNA, 402 bp, Triticum aestivum
  Clone ID: LIB31-044-Q1-E1-A10
gaagatcctgagcaagcggcgaagggactacttcaagaagcttctcaaaggggcagtgctgacaacatcactgtcgtcattgttcgcttcttggacggaacgacgacgtctgctggagatggaccgggcgaggaggttgccaaggaccaaagtgaggaggtcgccaaggaccaatcttcatagttcttgttcctccacggcgttgtatccgctgttgtatctgatgctcaaagtagatgtcatgtggcggcgccctcccgtgctgcgaaaccgaaactgacttggcctgagtttcgtcgttgttccatgctctcggctatcctagatggtaggtaatgtcggaacacagggggatggtggggcagtgttgttaccatatgattcaacgtgtaacttttcttt

SEQ ID NO: 11195 - DNA, 368 bp, Triticum aestivum
  Clone ID: LIB31-044-Q1-E1-A3
cctaaatttattcttattatttttggagttgaaaacgctatactactgtattatgttactacgaaacaccgtaaagatgataggagggcaccaaatctgttgcgtcattcatatgtaaaaaccccaaaatgaacagatggatctcaactaaaacatcacacgacgtcgcctgatttaggggcgaccctagtgtagctgcacggtagagcgcacgccagatgacagaaaacttatggttattcatcgctgtaataactagtcaacaaaaatatggcgtcgccgattttattccagccgagggccggtgcagggctacggcttgaaactttggaatgaaccacagaggtccgtccaggtgccaactgatg

SEQ ID NO: 11196 - DNA, 394 bp, Triticum aestivum
  Clone ID: LIB31-044-Q1-E1-A4
tcccaggtccacacgtgccacggaacaccactggcccatttagcttacaaagccggcccgtttgacttggtcaaaagttaacgggctggcccatgaaaagcctgttaacggtctcttcgcaaatagcccatttcatggcccgttaactcacggcccgttaggccctaaaggaaatcggcccaacaacgtcatgtgggccgtcgaatataacaccagcccatttcacttttggcccatgtatggcccacgacgtctttcggcccatatgaggccttcgtatctttcggccctttacaggcccacggtgactctagcccataatgaacagtaattttctttatacccgttaacggcctgtgatttacatgggccgtttccagcccgtgttagcttt

SEQ ID NO: 11197 - DNA, 382 bp, Triticum aestivum
  Clone ID: LIB31-044-Q1-E1-B1
gacagtgggcgcaacatgtttgaagggaacgatgtgtcagatggcatgggcttcggaatgctaaccgagggtgagagatccttggtcgagcgcgtgaggcaagagctgaagcatgagcttaaacaggtaaaactcgctgccttccattctgtcagctgccactatgttggtgtccaaactgaactgtaaacaaaattattttcctgactttgcaggggtatagagaaaagcttgtggacatcagggaggagatactgcggaagcgaagagccggaaagctcccaggggacacggcgtctaccctgaaagcttggtggcaagcccacgccaaatggccgtacgcaactgtagtgtgacagacatcccgcatataccgtcatcg

SEQ ID NO: 11198 - DNA, 440 bp, Triticum aestivum
  Clone ID: LIB31-044-Q1-E1-B12
ggtccacgacctcaacgggaccaacaccactgataactcaatgatggatatacactcccttatcatgtccctcaatttcacccaaatcgagataaaaactgccaactttgccaactcatggggagatggggtgctagtgatggtctctggtcttgtacagaccaaagagtacagcaaccaaaggaaatttatccagatatttttccttgcgcctcaggagaaaggttattttgtgctcaatgattatttccactttgttgaccaagaacaagtgcaacctgcacaggtgagagctcacgaagcctttgagactaacatggcatccaacacagtccaaacaagtgcagagtacattcatgaagaaagtcgaacaatgcaagctgttccagtaacatctgaagaaaatgatgctgttgacagttacacttactctgaaccac

SEQ ID NO: 11199 - DNA, 389 bp, Triticum aestivum
  Clone ID: LIB31-044-Q1-E1-B3
gtcgacagcaccgtccaagttgcgtcggtctagcctagagtacttggcatcccacaggtgaaggcgttgcgtgagcgcctggactcgtgggtcggcaaagtgcataccacactgttgtccatcgaggcagagacccccgatctcgtggcggcttagcttgttggccaaaaatgattctgaataggctttggttgtcagcaaggcggcggtgtaaaacgagagaccatctggctgtgctgcgcgtgctagctgctcttttcttgataacgaaaacttgttgccttgggtgtcctattggtctggacttgtaacttccttctatcatcacggatcgaaacagagaaatcataccggcagagggtgtcactagttttttcctgttgaactta

SEQ ID NO: 11200 - DNA, 392 bp, Triticum aestivum
  Clone ID: LIB31-044-Q1-E1-B4
gtcgacgagccactatattctgagtcttatgattacacaaactcctggcctggaaatacttttcaaccagacgttggtcttggatctatcggctttagctcttcttcacatgattaccagtcttctgctgcaaaacactcagtgccactatcagtggataaccatgtgcctgccatgggaacaggagctttgaacagttcttacagtcatcatatggcaggtagtgggaattcaacctctgttgctggtgacacgcaaccgatcatgagtgatgctttttatattgaccctgatgataagtttatgggcagttcttttgatggactgccttttgatttcatcggtattaatagtccaagtcctgaccttgatgaactcgatgaactgctgga

SEQ ID NO: 11201 - DNA, 377 bp, Triticum aestivum
  Clone ID: LIB31-044-Q1-E1-B5
tcccgggtcgacaatacccactaggttaaaactgcgaagttggtggcagttttggacatcggttttttcggggttgtgttcgcggccacaacattcgccattggagggcttgacatgaaaatcatggttattggattgatatgtgcttgccttagcgtgttcatgtacgggtccccactcactgccgtgagaacggtgatcgcctcaaggagcgtggagtacatgcccttcttcctctcattcttcctcttcctcaatggaggagtctgggccacgtatgccatactcgacaaagatgtcttccttggggtccctaatggaataggctgcttcttgggcggcatccagctggttatctatgcaatatacaggaacag

SEQ ID NO: 11202 - DNA, 407 bp, Triticum aestivum
  Clone ID: LIB31-044-Q1-E1-B6
tcgtgggtcgtcggaactgtctacagtgagtcgtactaatgcttgtttctcgccgtgacagagaagtcagagcttcatgcgtttaaggctccggtccatgcggcggtgcaggtcatcgccgtgatttcgtcgggcctgggagaggtgagagacgggactaggttggggattgcaggggcattttcaacatttctctatgggtccatcttgtcaggggcaaatcatcaagatttcagcaaacgtgtggcaaaccattaatgacgacaaaaatgagggaaaatcctgaaagtgcaaagaaagatgtggcaaatcctcaaattccccgagaaaacactgtccccgatgaagaagccaaacattctagagttaattccaattaaatgagcaaggacagaaccaccaaagcc

SEQ ID NO: 11203 - DNA, 359 bp, Triticum aestivum
  Clone ID: LIB31-044-Q1-E1-B8
gccagtcccccacccacacactttttgatcctgagggcggcgtgatggcgctgaggggtgtttggcagctgcagaagcttgtggtgaactactgcgattggggagggagcagcaggggaatcagggcttttatggagtcacatcttccagctttgaaggaaaagaatccccagttagaggtagtgacacagcttgtccgtggtcagcatcctaacttgaagggcatttacaaaaaccataacgagagagtggtttgcgtcagaaatttagcacctgaggacatcatgttgcaagctagtaggctaaggtgttctctgggcaggaaagtggtgaagctgagaaccagacacgtgacgaaa

SEQ ID NO: 11204 - DNA, 386 bp, Triticum aestivum
  Clone ID: LIB31-044-Q1-E1-B9
ccacattctccgctaaaatgagtcacattatacacttatagacctgtgtacactcacaaacgcatcagtcccttaatctataagtcttcaatacaccaaaatcactaagggggcactagatgcacttacacagtcagaccgcccggttttctaagtatttccgccggtcattaaaataaattaaaaaattttcatgaagtttccaaataaattttccttgcaattttaaataacaagttataaaataatttaactttccttgaaaacaatgttccaacatgtattcacaagataattcactaagtaccttaaaaatattccacgtgtattaaataaatattacacgtgtacatgtaaaatgtacaacgtgtataataatactatat

SEQ ID NO: 11205 - DNA, 358 bp, Triticum aestivum
  Clone ID: LIB31-044-Q1-E1-C1
cgacctgggcgacgacgacagtcaggggccaagagaagcgtggagacgtacaagatctacatcttcaaggtgctcaagcaggtgcaccccgacatcggcatctcctccaaggccatgtccatcatgaactccttcatcaacgacatctttgagaagctcgccggtgagtccgccaagctcgcgcgctacaacaagaagcccaccatcacgtcccgcgagatccagacctccgtccgcctcgtcctccctggcgagctcgccaagcacgccgtctccgagggcaccaaggccgtcaccaagttcacctcgtcctaggctccgcgtgcattagttcttgtgtttctttcctgttccctgt

SEQ ID NO: 11206 - DNA, 423 bp, Triticum aestivum
  Clone ID: LIB31-044-Q1-E1-C12
tcgactacggtccattaaacaggacgacattcaagaacaagtatcaacttcccaacatcaacgagctattcgagcaactcaaaggtgctaaagttttcttgaagcttgaccttcgtatgggttatcatcagattcgcattcgtgaagaagatattcccaagacaacattcagaacaagctttggttcttatgaatatactgtcgtgtctttcggccttgtcaatgctcctccaacattctctcggatgacgaatttcatcttcaacccctataccaatgaattcgtcctggtgtatctcgatgatatattggtcttctccaagaataagaaggaccatgccaaacatttgcggttggtgctcgacaagcttagagagtataaattctatgcgaagttctccaaatgtgagttttggctcgatg

SEQ ID NO: 11207 - DNA, 403 bp, Triticum aestivum
  Clone ID: LIB31-044-Q1-E1-C2
tcgacgaggacaagcatggagatgagtctaacatcttcggtgggcgtgtggagatgtgtctccggcgtatctgcctttggtggatttgctcggatctgttcatcgttcgtctacgtttgtgtgtctttaggttggatccttccaatctacactattcttcatcagcgacgtttgctgttctggtgcgctggttctatggggccttagcacgaagactttccgactgtctactacaacaagctttgcccggctccggcgagggggggctgatgacggcggcgcgctttcggcccgcttcgatgcttgtaattatcggtagatggtctatgaatctgaatgtaatttttattatttccggtgttcgttgtactgccatgattaaagatgaatacatccaatgttt

SEQ ID NO: 11208 - DNA, 404 bp, Triticum aestivum
  Clone ID: LIB31-044-Q1-E1-C3
gacgtcgacccggaagcgcattatttttattttttttttttttttttttgcattttgttcatgtcaccatgtgcatctcatttgcatacgtgttcgtctcatgcatccgagcattttccccgttgcccgttttgcaatccgacactcccacatgcaccggcgcaccccctcttgtctcttttcgtgagcgggtgtcaaacgttctccgaatggaccgaggtttgctatgtggccttggtacaccaccggtagaccacctgtcaagtttcgttccttttggaggctgcttgatgctccaacggttaaccgggtaaccacaaaggcctcttgtgtggtgtagcccaacaccctccaaaacagcccaataacccatctaagccccctccatgctctccgccgttcga

SEQ ID NO: 11209 - DNA, 369 bp, Triticum aestivum
  Clone ID: LIB31-044-Q1-E1-C4
ttccgaggtcgacagagacgaaggacaccggcaccgacataccattaaaatcgcatacacctgttgtgcacatctctgctcttcctgagggcaccgttgcggtttcaacatagtaagaagagcagcacggatggatcagcgaaagagatggcattttcctctgaccacacatactctttgacattctcccattgaaagatctgcggtttacttcagctctggcaccattgagggtgtgcgctaattttctttggcaactattgtggcaaaggctgtagcttccagagtgctaatgcgaaagcctgagacttgaagtgttattgcttcccttgtgataccctaataataaatgcatttggcgacttcagt

SEQ ID NO: 11210 - DNA, 392 bp, Triticum aestivum
  Clone ID: LIB31-044-Q1-E1-C7
ctcacaggacaacataaaatcctatcaagagtctaactagtggctgtgtgttcacctggggatgaacatgttctgcatgatgtttagctgttactgcaactttaaaaaaaaaaaaaaaaaaaaaaaaaaaaaaaaaaaaaaaaaaaaaaaaaaaaaaaaaaaaaaaaaaaaaaaataaaaaaaaaaaaaaaaaaaaaaaaaaaaaaccggccgcccaaaaggatcaaacctaacttacccttgaatgcaacttcaaaccccttcaaaattgtcaccaaaattaaatcaactgcccttcgtttaaaaacttcttaacgggaaaaaccctggcttaaccaaactaaacccccttgaacaaaaaccccctttcacaacctggcttaataccaaaa

SEQ ID NO: 11211 - DNA, 369 bp, Triticum aestivum
  Clone ID: LIB31-044-Q1-E1-D1
ttgaacctgaggaatatgggtggaactatcatcagtgtgaacgacacttacatgggaatgaaattgagattgatattgagcccactgacacaatcgacagaatcaaggaacgtgttgaggagaaagacggtattccacctgttcaacagaggctcatctatgctgggaagcaactcgctgatgacaaaactgctaaggactacaacatcgaaggtggttcagtgctccatcttgtgcttgctctgacgggcggtcagtagatgcaacctcgacgtggaccgtaaaggccatttctaccagaagttgtttgcaaacctaaatctgtgaatttgccggctgatttaagtgccatgtaattgacgcatttgt

SEQ ID NO: 11212 - DNA, 387 bp, Triticum aestivum
  Clone ID: LIB31-044-Q1-E1-D11
ggtcgacgagttccaccaaatctgttcctactaaacacaggatacttgttacagctccacattgccaacaactcattagcgtatcaggcacgcaatgggttcgggtggggtgcaactggcccgcccgcaaactcaagggcggtcgaacaaagcagtgcatcaatgctagctctctacatttcgcatccggcgtcgtaatcccattcagtaaccgccgctcgatgcattactatactccaggggataaacgccatatcttagcccgcacgagacgtggatctcggccgcaatccggatgaggggacgggagatgaggctctggctcgtaccttcggcgaccttgaaccaatatgccatggcaggatcatcgcaccagcaagatgatgg

SEQ ID NO: 11213 - DNA, 371 bp, Triticum aestivum
  unsure at all n locations
  Clone ID: LIB31-044-Q1-E1-D3
gtttcccaaaaacttcagaagctgttgtacaagatcatggaccctgatccgaacaagaggatatcaatccagaagataaaggagtccacctggttccggaaaggtcccggggagaaccttacagtgaaggagagactgccaagtgagaatgccaacacggatgctgttccaacacttggtgtgaggcgcaggaagaacagtcacgaagacgcgaagcccctggcggtgacaaatttaaatgcctttgaaatcatctctttctccacagggtttgacctctctggcctattcgtcgagaaggagagcaaaaaggaagcaaggttcacttcanaacagcctgcctcagccattgtctccaaactggaaactgt

SEQ ID NO: 11214 - DNA, 369 bp, Triticum aestivum
  Clone ID: LIB31-044-Q1-E1-D6
gttcacacgagttgtgaatgcaaaaaggcaagtggttgctgggaccttgcacgacctgatggtggaggtagtggattctggaaagaaaagtatgtacaaggcaaaggtatgggtgaagccgtggcaaaatttcaaggcagttgtcgagttccgtcatgccggtgacttccagtctgagtcttccgttgcttctgatgctagcactgggcaagctatcctcaagctgtctcttcaaaccgacatggcaccgaagatgcacagcaacgagaatactggactttctgttgactcatcctcttctcaggcacacacggtgtgaaggtttcttccatggagtatggaactggaaggcgtgaaggtcggaacatg

SEQ ID NO: 11215 - DNA, 398 bp, Triticum aestivum
  Clone ID: LIB31-044-Q1-E1-D7
ctcgcgggtcgacactggtagtcagcctgcatgctacaaatcagaggctgcgcgaaacaattgttccaagtgcaaaggcatatcctctggaagcactaatggatgattgcaagaattattccctcgaaactggacgcagggtatccttcgagtacactctgctagctgggattaacgatgaaaaggcgcacgctgaagaacttgcagcgctgctgcatgcatgtggaggtggttatcacgtgaacttgattccctataacccggtagaaggatctgagtacaagaggccgtacagaaaagcgattcaagcgtttgttgatgcactggaatctcggaagatcacagtcagcgttcgacagacccgtgggcttgacgctaatgcggcttgtgggcagctc

SEQ ID NO: 11216 - DNA, 421 bp, Triticum aestivum
  Clone ID: LIB31-044-Q1-E1-D9
tccacgaagaagccaatctggtctcaatatcttggacccgaatatctggtgtccttcagtgaccagctaaaacagttggttgagctgcacaggtcagcagagctagccgtgaaggacctgatagtctggctatggcctgccgagcctatacctagcagctacttcggacttgttaagcggcttgtatgtgcctgtccgcggctctaagccgtgaagcggtcagtctgtattgaacgttcgcatatggcctttgcccgcgtcaagacgcattaggcaaaactggatgccaagaatctgaccaaggggccgccggatggcaatgattattatcgacgcgaactctattttgatggcgtcctggaggggtcccgccttgtggcggagcaatgttcgaacggctacatattcccatgagaacatg

SEQ ID NO: 11217 - DNA, 280 bp, Triticum aestivum
  Clone ID: LIB31-044-Q1-E1-E1
atggatcagtcatagattttggctcacgctcagaaaggtttgatattggcacctgtcttgaagcgattgaacatgtggacgaggaccactcaagtttatttggcataactgtgatgagttcattctgtccggcggtgctcattgtttccacacccagctactattacaaccctatcatccagatgtcagctttgccaatcaacgaacagaaacgtgaacatgacgctgggtcttgcaaattccgcatccatgaccacaagtttgagtggacgaggtccca

SEQ ID NO: 11218 - DNA, 412 bp, Triticum aestivum
  Clone ID: LIB31-044-Q1-E1-E10
tcgacataagacgctaaagtgagtcgtaataaacttggggagagagtgtttttcgtgcacacaccagagttcgaacctctcaagggtttgctagaacccgtaatccgacagaccaagtatggagccatcgtgtacattcatgaataatcttctcaggagaagaaccacatttacgattaaacaccacatcattcctggtaagccacagagccagcataaggcagccgccccaacaagaatatgtgcagaaaattgttcatcaataccccacaactaattgctgaacatgttatgcacactgtgtggggttacagatttcaagattcttgaactatggcccatactgcgcgagcaaacttacactcaaaaaatatgtgttttgatagactcgtcatgttggcaaaagacacat

SEQ ID NO: 11219 - DNA, 363 bp, Triticum aestivum
  Clone ID: LIB31-044-Q1-E1-E11
gggtcgacacgactcgcgagatggagtcatagtaggtgtagaaattcacaagctgcatgaccggaagtgaacaacgcgggcacagtcggcatctcggacgactcgtcgtacggagtacggccacggcgaccatgacccacggtatgggcatggctatgatgctcagccggttgggctgtcattatacacaaccgtcaccctggccttggtcacgtgcttggcgcattgcttcggtgactgaggactgacttccgttgagaactatactgtacctttaccgcagttggtaatatcacattcatgtgcgcagcaatacatgaaatttgaggtcgtgatgctgcttgcagcatacagtatctgatc

SEQ ID NO: 11220 - DNA, 444 bp, Triticum aestivum
  Clone ID: LIB31-044-Q1-E1-E12
cccaggtcgacgaccggcatgacagtgccccggtggcgaagctcgacgaccatggccctggcagtgccttgacaacctttgcgacacccctcgagcagagctcatcgccccatggccacgacgacggggtgattctactacggggcgttaggatggcgccacggtgagatgcagggatgacacactgcttgagcgacgtgcgttggaaatttcctttttttcctgtgagatgtgcgagaggaggaagacgaagatccagtggctaaccaacggtcgcgcgtgctgaatcggatggccgcgcaatgaccggtgcctagtagactccattaaaaaatgtacacgtatttaaaaagatcatgaatttagaaaatttcttgaaaacataagttttcttcattaaaagatcatgaatttttaaaaatattcatggaatttacaaaatat

SEQ ID NO: 11221 - DNA, 339 bp, Triticum aestivum
  Clone ID: LIB31-044-Q1-E1-E3
gataaatgctttatgatgagtgaattcacagagctctgggacgatgacgtgccgttgccgggctatttcgaggtcctaactaagtggtgtttgttcttgtaaattacctctctgatttgtttgttagcctcaccagatagatgatactaactaaattaccttgtccattatggcttgagtttttgttggtctcttgggtgtctagctctagtggctccttggacagtatatcgatcctgggtgaaaatgtacctgacctatgacgtgaacattgttcacttaattgcttgacatataaaagttgtaaagctggggatgtgcaaccagcttcaccttcag

SEQ ID NO: 11222 - DNA, 236 bp, Triticum aestivum
  Clone ID: LIB31-044-Q1-E1-F1
ctccagggtccacataaatcggcgggatgagcacagtattcacagcgatgagcagcgaagcagatgagtgttttatcctatctggcaagtggtctatcattccatttcaacattcgctaatacgctgtaaccactcgcatggggcacgtggaaatccgtatctctaacgacatgacaacttgtttcggggtttttaccagggtagacatttggggtctagcaccatcagggaaacg

SEQ ID NO: 11223 - DNA, 380 bp, Triticum aestivum
  unsure at all n locations
  Clone ID: LIB31-044-Q1-E1-F3
ctccgccanggtatctggagcaaggaggtatttatagagcgaagaggcggtgcgggaggccaccaagcggggcacaacccaccagggcgcgcctggtcagcctgtgcattcggtttttttggtttgattcggtttggttcatacggtttttggtttatacggtttttatactttggtttatatggttttatacgaagatatggtccggtttcggttgcaaccgtttgctttcggtttggcttccgtaataaccaaattaaccaaagttgacgcgaatatttgaatggacaagaaacatttttggtcacatgatttggtatgtgcatgtagccatgtacctaagatttttcttgtaagaaatgcctacggatattagatca

SEQ ID NO: 11224 - DNA, 382 bp, Triticum aestivum
  Clone ID: LIB31-044-Q1-E1-F5
cacaggacctggactcgcgggtcgacagaactccccatagtgattcgtagtaaacgtgcttttctcaatggttctccaattaaaacatcgcctcaaaatgagttggtgaaggctcttatggtgacagaggtagggaccaaaagagacaagcccactttggatgatacaaccaacagaattaataagttactattcaagattagatctatacgtatgtgtggctctttggctctaaacatgtgtggagttgcttgtggtaggctagatttgtgttatgagatcggttttggtggcccctgggatgtggctgctggagctttgattctaaaggaagctgggggttttgtttttgatccgagcggtgatgcgtttgatctgatgg

SEQ ID NO: 11225 - DNA, 426 bp, Triticum aestivum
  Clone ID: LIB31-044-Q1-E1-G10
cccaggtcgacagacgacacaaagggggtgttgatcctactgctgctgtgaaccgacttcgcagccagtcaagaggccgtaagcgtgagaggtcactgagcagagctgatggtgatgatgctatggaagttgatggccagcactctgacaagaagctgcgtatgaggtcgaggtctaggtccaaatcacgaccaattgaagaggttgtaccaggtgacgggatccgggatgttgctcaaaagaagaaggccatcaagaaatcgagggactctgtcaagaacaggaacaaggatgctcgccgtggagaggcggatcgcgtcatccccaccttgaaaccgaagcatctcttctctggaaaacgaggagttggaaagacgcagaggcgataaaccagtcaatgtggacgttgctgcttgcaatcacgcg

SEQ ID NO: 11226 - DNA, 357 bp, Triticum aestivum
  Clone ID: LIB31-044-Q1-E1-G11
tccacacggctgtctaaaatgagtcatagcagtgtcgccctagatcttggttctgcttattgccgcgtcaaggtccacttggcggacggtcaagtccaaccgttcttcaccatggacaacctcgaccaactcagtggcatccactcgcggatgatgctcccatgctgcactgccgtcaatgtcaaggaggaggaggccgatcgaggagccctgatttcttgtaactgcgttggtatttccccgaaaaggagaggatgaagcagcacaacgacggtaagtatttccctcagttatgaaaccacggttatcaatccagtacgtgaaccaagcaacactatgctagcggtaccggcacac

SEQ ID NO: 11227 - DNA, 388 bp, Triticum aestivum
  Clone ID: LIB31-044-Q1-E1-G4
tcgacaagaactcgccaaatgatcaattccctgcagaatggggggttggttcaatatttggtgccgagtgtgagaagcgtggtatgcttatcagggtcgctggggataacatcatgctgtcacctccactaataatgactcctgatgaagttgaagaaattgtgagcaaatatggcggggccctaaaggccacagaggaaagaattgaggagctcaaatcagccaagaagtgagcaatgccaatttgctgaaagcctctagtgatgatggtgacgacaatgtacagagtgacttgaacaaataaataccaataataacaccgtgagcctgaaaattgatcttgatgcaaaaaaaaaaggaaagggcagaaaaagaaagcggccgctct

SEQ ID NO: 11228 - DNA, 306 bp, Triticum aestivum
  Clone ID: LIB31-044-Q1-E1-H1
taggccctactcaacgtgcccgtactgcagcaatggagaacgttagcgatgggtcatggccaaagaacaaccccggcaagtagttctacaagtgcaagcatcactggactaggaggtgtaaattctgttaatgggaatcggtgtacatcaagaactgctttgtgcaatgtggcctaagctgttcatccataccgacaacttgcccatgagtaataaggcgcctctcaatgtcccctcctcatcgttgggattctcagcccagccgttgttctgtacccctgcatcaagctacatggaatatgctaa

SEQ ID NO: 11229 - DNA, 430 bp, Triticum aestivum
  Clone ID: LIB31-044-Q1-E1-H10
attcccgaggtcgacgatggctgcgtatggtgtgcgtctctccgacgtgctcggcgtgctgccgagggggctgcagtttgaagtggctgggtaatgaagttcagagaatgcttttttagtacattcagagaagttgctttcttgcttttgtgatattttggctacacaggtacttagtgcagagaggttgtgacctttgggtcctctcatcttgaacacttgcaccacaacctcatctcatgggtaaaatgactattagtaaattggcactaaaaatgaatacagaataagtagaaagacatgatgacctcatctcacgggttccatctcaatatagctcaagctttttagaaactacatttgacacaaagcactaaattgatatagttgtgatagcttccgaagtaagtgtatcacttttgcagctttg

SEQ ID NO: 11230 - DNA, 439 bp, Triticum aestivum
  Clone ID: LIB31-044-Q1-E1-H4
cctgctgtaccggccctaaattctcgagtcgacctggacttcatatcgatggcatcatctagtcgtttgccaattggatcgcggagttcggattaccataaatgtgggcatctcacacaatgtggtgttatgcacacgagcatagctctcggatataaatgaatgagatgctccgtgtatcgatgagcacagatgccgggtggcgattaacaaggagcgtaccgagaacgacgttgggatcttcttgatcctcttccgcagaaacataattaacatggccacgaacactggtggacggtttggtgtagaacactttccctgtcggatttccgcatccaacagtttttgctgcctggttggggttggtttgaggacactcgcgcatatagtggactgattccccacacttgaaacaagtcacggtactggtaccttggca

SEQ ID NO: 11231 - DNA, 345 bp, Triticum aestivum
  Clone ID: LIB31-044-Q1-E1-H6
gatggccaaatcaactatgaggagtttgtcaaggtcatgatggccaaatgagcacccaaccgtgctcccaagacaggaggagaattgtgcattgcatattagtttaagatgcaactcttatttgatcgatttccagttaagcatcctacctagctgtagctgctaaaacggatcggacgacgcaattcctgctatgttctccagtgtgtttccagacctcttgtgttttatgtgaacttgtgtcctccctggtgtatcctgattgctgttgcgcccgtttgtagtatattttttcatcaacttctgcttgactcttctagtatcaatggaaagctggtgtttcgt

SEQ ID NO: 11232 - DNA, 396 bp, Triticum aestivum
  Clone ID: LIB31-044-Q1-E1-H8
tggcatcatctagtcattcgactggtggtatgctaagttcatactgtattcaatgtgtgcatctgcagcaatgttgtattgacacattgatatggtggcaggaagaagatccatgatggtactttggggttcttgcgttcaaccctcttgtagatattgaaaagcatgaaatggacattagattacgtattgggtacatattcacggttttctctaccagaatatattgcttctctattgtttggccaagtaatctagattcaccttatattcttgaaggtattagtctatcagattattaatctatatttcattttccaagaaatcaaaggacgagtcaaacattgtacgagcttcgactagcagaacctgcctcggaggtggtggccaacagtg

SEQ ID NO: 11233 - DNA, 350 bp, Triticum aestivum
  Clone ID: LIB31-045-Q1-E1-A11
caccttcatcatggacaccgagtgcatcttctacttcaactgcaccagcaccaccatcaggtgccacctccagccgtgttacaagaaagcaggcacaaccaccattatctgccaagagtgcacctgctgggcctgcgcaaagttcttcttcttccatggcatcaacggggcacacaagtgatattatttgttgtcattgtaagggaagaggtcattatgcgagagaatgcaaatcttagtgtgtgatgattgctactaaagatggtcggtatgagtccactagtgactatgatgagcagactttggctctaactacacgtgaacaacatggtggagattattctgattat

SEQ ID NO: 11234 - DNA, 400 bp, Triticum aestivum
  Clone ID: LIB31-045-Q1-E1-A8
gtagtgttccaacagctgtgctctatcatggatcagtaacagattttgattctcgcttatatgggtttgatattggcacctgtcttgaggtgattgagcatgtggaggaggaccaagcaagtttatttggcaacattgtattgagttcattctgtccggcggtgctcattgtttccacacccaactacgaatacaaccctatcctccagaggtcagctttgccaaacaaggaagagaaacgggaacaagacgctgggtcttgcaagttccgcaaccatgaccacaagtttgaatggacgaggtcccagttccagcactgggctactggcctcgctgcaagccacaactacagtgtggagttcagtggcgttggcggctcgagcgacgaacctggctatgc

SEQ ID NO: 11235 - DNA, 419 bp, Triticum aestivum
  Clone ID: LIB31-045-Q1-E1-B11
gggcccaatgttgtttgatatcgacttgaagatccaagccagctaccatggagagcatgttcctcttgtttccttgatgagcagactggatggcaaagcaattgttggacaccctatccaaattgaaatacttgtagatggttccactgaccacctggtttctggtggtgatattagtatggaagagagcacaggagctccaactgcttggcgtacaggcaggaggacagccatgcaaagaattccccgttctaatcctttaggagcatcaatggactgtggcaatgaaggcaggcttgcatatccagactgggaaatgaaaccagtcttcagtaaatactcaacttctgcaaatcaccaggttaagaaaagcatgtcaaatagcaagcagaggtcatcggcatccaaatctcaaaaga

SEQ ID NO: 11236 - DNA, 401 bp, Triticum aestivum
  Clone ID: LIB31-045-Q1-E1-B3
ggtcgacatccgcatgaacctcaaggcaaaaagggtcgagctgaagacgaggcatgatacaccagatgtgagcaaccttcagaagtgcgcggacttcgtgcatgcttttatgcttggatttgacattgccgatgccgttgccttgcttcgtcttgatgacctgtatgtggactcctttgagatcaaggatgtgaagacactcagaggggagcatctgtcacgtgccattgggcgcctgtcagggaaaggaggcaagaccaagtatgccatcgagaactctacgaggactcgcatagttattgctgatacgaagatccacatactcggatcctttgttaacatcaaagttgccagagattcactctgtaatcgtatcttaggttcccctgccggcaaggtct

SEQ ID NO: 11237 - DNA, 459 bp, Triticum aestivum
  Clone ID: LIB31-045-Q1-E1-C1
ggtcgactcccacagaaaacgattgctatctcatcgaaacatcgagacagctttgcccctatcaagtggtatcagatttccaggttgctcggtgagattttacagtttttcgtagtttagattgagtctgttcttcatacctatagtccacgaaaaagccaaaaaattaaggttagttcatcttatccgaaccaatctgagcctttgcataatctttttggtatttgctttgttgaatttgcggttgcatcatcgtgtcaagttgctggtcctagagtctagtcctttagagtttcgagttcttctcacaagttgtcacgtcgccgccgcaccatcgtcatcaccgctgccatataccaccaccatcatcaccgctgccatataccagcatcgtaatcaccgctgccatataccaccatcgtcatcgccgctcccatatacgacatatccaccgccatc

SEQ ID NO: 11238 - DNA, 224 bp, Triticum aestivum
  Clone ID: LIB31-045-Q1-E1-E4
acagcacgcagccctgcaggagacatttgcttgggtcaatactaatatgcattgttctactttgccggatcttcctcctattccgccgcctcctacttttagctttgtaaatcctcaacttttcaatcatgcatcttaccatcatgcttaaagatcatgcttgaagtgtcccccgtcgggagaaggatccaataactttgtggtacgtggattctaactgccca

SEQ ID NO: 11239 - DNA, 370 bp, Triticum aestivum
  Clone ID: LIB31-045-Q1-E1-F10
acggtccgacatcacgggtccacagcgacgaccaaagggtgttgctacaaatcttcaccaagccagtatgggacaggccgacgttgttcctggagatgatccagatgatcgggtgcatggacaaggacgagagacgggaagagtaccagaatggtggctgctgcgggttcggcaaaggcaacttctccgagctgttcaagtccattgaacattacgagaagtcccttgaagccaagcaatctgctgcagttcagggatcatacgatagaagctggagctggatgagctgatccagtactttgtatcaggtctcatggagcaaaagaaaatgatgttgtttgtaagatgcggtgcgcaattatgtccgatg

SEQ ID NO: 11240 - DNA, 343 bp, Triticum aestivum
  Clone ID: LIB31-045-Q1-E1-H2
gtcgacgagttcgatgtcccagatcaaatcatccgcgccccaatcggcatgcaatcggaggcctacgctcagtatacacaaggtgtcgggttctacagacaacgatcatagacctatcattctacttcaggctcaccgttatgcaagaagctatatatagacaaacttatatcatatacccaacataggaagtcaaaataagtgtatgataagatttagataaaacagtgtgtataataagatgagtaatagacatcagatgtgtagaagtgataatattgtgaagaaattttgtcagactttgttttggcagcattgctgtgaatacagctcatacgtggca

SEQ ID NO: 11241 - DNA, 482 bp, Triticum aestivum
  Clone ID: LIB31-045-Q1-E1-H6
aggtccgagattcccgggtccacaccgtgggctcaaaagaaaatgctggggcatctccagctcaaatacaagaaccctgtagtcatgatccatgagaacggagctgctgggaagaacaccccggatgacgacgagttcaggtcgcagtacctgcaggactacatcgaggcgaccctcgaatccagcaggaacgggtccaatgtgcagggctacttcgtgtggtcattcctggacatgttcgagtatatattcggctatcgcatgggttttggcctctatggtgtggacttcaactctgaggagaggacgaggtaccagaggcactccgccaagtggttcaccggcttcctccatggcggcgagctcaggccggtggctctgcccggcaaggtctaatcccagtgatcttgtcacacgtcgtcacgcttccgtagcccacgaacaggaaaatgcactaataagcctggatggttaagtgttgt

SEQ ID NO: 11242 - DNA, 407 bp, Triticum aestivum
  Clone ID: LIB31-046-Q1-E1-A3
attcctaggtccacgagactgtcatactagggaccgtatttctacacaatatgttcccctttgagaggttcatgggagtcctaaagaaatatgtccgtaaccgcgctaggccagaaggaagcatctccatgggccatcaaacagaggatgttatcgggttttgtgttgacttcattcctggccttaacaagataggtctccctaaatcgcggtatgatgggatactgactggaaaggcactcttggaagagactcaataatatgcagggacggatattcttggtctcaagcacactacacagttctacagaactctaccttggtgaccccgtatgtcgatgaacacaagaacagtctgcgctccaaacacccggagcagttcgacgactggattacatgtgaacaca

SEQ ID NO: 11243 - DNA, 406 bp, Triticum aestivum
  Clone ID: LIB31-046-Q1-E1-A4
gtccaccagaaccgggcacttgtggatgctcctgatatggtcaggtgccagatgaacttcaagcgtctttcgctgatcgacatcaagattgacatcaagcgtatccctaagaaggcaactttgatcaaggccatggaggaagcagatgtgaaaaccaaatgggagaacagctcatggggtaagaagcttgttgtccagaagagaagagcatcgccgaatgactttgacaggttcaaggtcatgttggctaagattaagacgggtggtgctatcaggcaagagcttgccaagctcaatgaggttgctgcttagaatatcctagtggatggcatgttgagttttttggtccaagttggatctgctctatgttccagtgttcttaaagccagaattagtacaactgttt

SEQ ID NO: 11244 - DNA, 339 bp, Triticum aestivum
  Clone ID: LIB31-046-Q1-E1-B1
ttccaggtcgaccgcgtccttgtacttgtccttggcgccgtccacggggccgccctcactgttgtcgtaatcgcagtactagatgagcgagatctcgcgtaggtactccaccgcggattcctcgatgggcagggtcatctctaactcgacctcagcgagacgcaaattgtcatctccgccggcacgcgcatctctaagtcccactcggggatctcatgaataagcaggtgctcaagaggcaactccgccttttctgagatgggttgcaagctggtttcccacgtgagctggaatatcatggcgtgtgtgtcctcaatcttgggaaggatggactccgac

SEQ ID NO: 11245 - DNA, 384 bp, Triticum aestivum
  Clone ID: LIB31-046-Q1-E1-B5
ggtccatctgatcaagagaaactacatggtgtttgatgaacaaccggctctcctgatccaaccgatgcttggcatacctccgagcttgatctgctttccatctctcgcttgatttcctgcaggaagtgcacacgacctcttgggcctaatctatccatgctactctagctatgatgtaccagactaccaggtcgatggatgtctcctagatcaaccataagcctggtagctatgttgctgcagcgccgccagagccgctgctgccatcagcggagactcccctgcatggcggatctcctatctgcaccaaccacctctcccgtggactcctctcaagtctcaacatggaagtggatggtggaacgtgacgtcctcctcactggc

SEQ ID NO: 11246 - DNA, 395 bp, Triticum aestivum
  Clone ID: LIB31-046-Q1-E1-C2
cggcgcgcctcaatggtggagcacgttcaatccgatgcagaaccatacacatggaggtttcacccgaagacctgctcccggggagcggatactgcagagccacccggacaatgtttaccagcctgtgcctccccagaggatgccgccattcttgtgaagaaagaccatttctcccatcactgtgtatatcgtttcgagagaggccgagtttagactgttgaagggaacccgaaacgatgccactggcgtgtgcctggtgtttttagggttctcttgccagcggacctggatttcgttcaaatggctgtggtgacttatgagatcgcgaatgttgctgtggtcggaactgtgtgtaaacggtttgccgaaactgctgccgttggacatgattgtga

SEQ ID NO: 11247 - DNA, 464 bp, Triticum aestivum
  Clone ID: LIB31-046-Q1-E1-D2
acgcctgtcggtacggctcctaaattcctaggtccacgaggcaacgataagatcaaagctaggggaacttttgccaacattcgcattgtgaacaagttcttgaagggagaggttggccccaaaaccgtccatgttccatcaggggagaagcttgctgtttttgatgctgctatgaaatacaagaatgaagggcatgacactatcatcctggctggtgctgagtatggcagtggaagctcaagggattgggctgcaaagggtccaatgcttcagggagtgaaggccgcgatagccaagagttttgagaggattcaccgtagcaatcttgctggaatgggcatcgtccctctatgcttcaaggctggggaggatgccgacagtcttggcttaactggccatgagcgttacaccatccagcttccgactgatgtgaatgaaatcaagcctggccaagatgttacagt

SEQ ID NO: 11248 - DNA, 430 bp, Triticum aestivum
  Clone ID: LIB31-046-Q1-E1-D4
attccagggtccacgcctacgccacaacttctaaccctggacgtatacggctagctgcatcgcgcgccacgtactacgtacggcacaacagaatgatttggattcgcacgcagtccacgctgccgacagtcaacgccgtgctaagggatcgcgcgcccctgatcgcccggttaatttgcctctgcgaccgcgccttctgtcccctagcttacttcaggttcaggccatgacagatggatccatacgtatgacgcgtgtgggcaacgtcgctggtggagcgcacgaacgcccacggcacggatatgtcgagataacgctatcgagatttatttacgttcatcgtgcgctgatggtggtggtgccatcttacacagtccaggtaaacgcagatggaatggatcggtgtatctactacccctataaaaagaag

SEQ ID NO: 11249 - DNA, 395 bp, Triticum aestivum
  Clone ID: LIB31-046-Q1-E1-E1
caacgacataccagataacaaaaaataagaagaggagaagaagaagaaaagaggagaagaagaaaggaaaaggagaagaaaaaaaagaaaaaaaaaggagaagaagaaggaataatagaggaggagaagaagaattcttcttcttctcctctttttttttttcttctttttcatcttcttatttatttctcctgttattcctctcctcttcttcttcttattcttcttcttcttctccttcttcctcttcttattttccttttttctttccttctttttcttctaaatatgaacatatatacataaatgactttgatcatacataattttcagatttctacacaatattaacaaaattacagcgaaaaagtggctcggccaaaaaaaaaggggcg

SEQ ID NO: 11250 - DNA, 398 bp, Triticum aestivum
  Clone ID: LIB31-046-Q1-E1-E2
ctggtgccctacagggttcaagtgtggcatcaactaccagccaccttccgtcgtccccggaggcgacctggcaaaggttcagcgtgccgtgtgcatgatcagcaacaacaccgccgtcgccgaagtgttctcgcgcatcgaccacaagttcgacttgatgtacgccaagcgcgcgttcgtgcactggtacgtcggcgagggcatggaggaaggtgagttctcagaagcccgtgaggacttggctgctctggagaaggactacgaggaggttggcgccgaaggcgcagacgatgagggcgacgagggggatgactattaagtagctggttaataagtagttggctggttaatgattggctttgatctgtatactcagtaagttgtccgttgcgttacat

SEQ ID NO: 11251 - DNA, 374 bp, Triticum aestivum
  Clone ID: LIB31-046-Q1-E1-E4
ctgcaggctcgaatcgccggtggattgggcgagcttgatgtgtcggcgggttgggcaagctataggccgataataccggcgcatggacccacgatgatgaagaagtcgtgtcgccatgacatgagttctcctccgatgcgtggtggggagatgggggtctatgctgggaagggagattggggactggcggttagagctcaggcacgacaatcaatggtggcattgtcaggatgacgaatttggggatgtgaggccagccgggatttaccggacatggggtggagcggtgacccccacttggatctacgagacgactacgaagcaacttttttgtagtctcatacaatggtggatggttgcacggtacgggagtg

SEQ ID NO: 11252 - DNA, 348 bp, Triticum aestivum
  Clone ID: LIB31-046-Q1-E1-G4
gttcttatttctggacgccgcccactccaagtgacggcctcgcccatgtctgagtttgagaaggcgagtctgatttcatgggcgaggcatctcgcccatgttggccgcttgcttgatcttgtggactctgcactcctggatgttaaccgtgaccaggcgctgctatgcatcactgtcgcactcctgtgtatccagaggtcgccaacccgtcgcccatcaagcgaggaggcgcttgaaatgctctctggtgagggtgaaccaccacatctccctgtagaattctcaccgtcgcctcctggtgggttccctttgagatcccccaggaaaggccggtgagtttagtttgtt

SEQ ID NO: 11253 - DNA, 382 bp, Triticum aestivum
  Clone ID: LIB31-046-Q1-E1-H3
gagcaaaaggtagggtttccagttgcgcgccgccgccgccgccgccatgggacactcgaacgtctggaactcgcaccccaagaactacggccccggatccagggtttgccgtgtctgcggcaactcgcatggcctgatccgcaagtacgggctgatgtgctgcaggcagtgcttccgcagcaacgccaaggacattggcttcatcaagtaccgttaagaatggaaacctcaaaggaagcaaggactacgaaattatcaacgaactgtggtgcttcatcgaggctgatctttatcctataagctatgtaatggactactattatgtctgaatcctggtgacaaaaccgtgaaaccatgttagccactgctgtttgagcatgtg

SEQ ID NO: 11254 - DNA, 424 bp, Triticum aestivum
  Clone ID: LIB31-047-Q1-E1-A5
cccgggtcgacagaagtatattggatattcattatatgaatgtgtactttactagtactcctagcagcaccagggtattagataccggttcggttgctaagtgttagtaactcgaaataaaagctgcggaataaacggagactagctaaaggtgagatgacgatgtgtgttggaagtgtttccaaggttgatgtgatcaagcatcgcatgctccctctaccatcgagatttgtgtttgcgttgagcatgattggattatgtttatcgcaatacggttattcatttaaggagaataatgggtactctgtttatttgaataataccttcaatggtcttgcacctaaaatgaatctcgatcgcagtgatacacatgttcgtaccaaaaaaaaagggaagagagaaaaaaaaaagcgggcgctctaaa

SEQ ID NO: 11255 - DNA, 324 bp, Triticum aestivum
  Clone ID: LIB31-047-Q1-E1-A9
ccgggtcaactcacatggctacatctaatatggattaacgaacggaaaaggactccacaaaacaagttatatgctcatctactaagagcgataaattgcgtggaggacaaatttgcacatccatgctcagatcattcattgacaccacaacgcatacgacgaagcaccaacaaacatgacgatttatgactttcacccaggcacagattctacattaatacttgcggcacctcaataatgaacatttatgatgcagtagatgacacagtgatcaataaaaacaattagttgaaggtaaagatgaatgttctggtacttggattc

SEQ ID NO: 11256 - DNA, 393 bp, Triticum aestivum
  Clone ID: LIB31-047-Q1-E1-B1
cgaccttgggacacagatagatgctcatcaggggttgcagttctattcacaggaaagccttggcagctggctggagcgcatgtagatcgttaaagaagtggacgatcgaagatcatctcttttccatctagtatgattatggtggcaacatttttggtatcgggttggaaggtagaagctgtgcgatcgtatctcagtgacgctttagactattgaagagtctgcacaaacacctgaacacctattttgtttcctgaaaactgaaaagacatgtaaaagcgttgttgttttccctcttttgcgaaaagtgtggtggaaacttggattaacttagctctttccatgtgtgcagttcaggtaactgcaggagtgccctggttaaacctggttatg

SEQ ID NO: 11257 - DNA, 268 bp, Triticum aestivum
  Clone ID: LIB31-047-Q1-E1-B4
gtgctgtacaaatggggaatatgacgcagggtgcttgctatggctgcgaaaacctctaatctgttgttcacccatccatcgaatcatattgcgtaggaaaaattagctagtattgactatcatgattccgtcactgtgattgatatcgactacttctcgatacctggtgggtaatgatggcatatgtggtcagtcttcgctcttgtatattagcttgccctttgcgagaatcatcatcgtatgcatgtgatatattcggggttttcac

SEQ ID NO: 11258 - DNA, 418 bp, Triticum aestivum
  Clone ID: LIB31-047-Q1-E1-D2
acgacgactactacaccggaggtatctactactacgtgcaggctgctgacgacgaccaggagtagttaggaggatcccaggcaggaggcctgcgcctctttcaatctatatcccagtttgtgctaaccttcttaatgcaaacttgtttacttatgtctatactcagatattgttgcttccgctgactcgtttatgatcgagcacttgtattctagccctcgaagcccctggcttgtattatgatgcttgtatgacttatttatgtttttagagttgtgttgtgatatcttcccatgagtccctgatcttgatcgtacacgtttgcgtgcatgattagtgtacgattgaatcgggggcgtcacaccctaggagcatgcgtagtagtacttttcttcgagggcaagtagacttttgcaat

SEQ ID NO: 11259 - DNA, 389 bp, Triticum aestivum
  Clone ID: LIB31-047-Q1-E1-E2
cagggtccagactccctctgaagtaacagatgcagtgagcagaataaacgggcagtagaagatcccccagcccaacacatatgcagagaccgaatccataaccaaagaccaccgcgctcgccgctcatgcgaggagcccgacgccgccaggccgtctcaaaaagaaacaggtgccgccacccgcctcacccaaatcggtacggaaacaaatgatcgcaaccccagctagtaaagcatactatcgatcgacacgtgcggtaggaagtattgcaatgggccacatgtacattcgagtagatcgacacgcccagacatgacgagcaacacgtttgcagggaagatttagcctgcaggtcacaaccccactatcaatctaggagcccccctct

SEQ ID NO: 11260 - DNA, 349 bp, Triticum aestivum
  Clone ID: LIB31-047-Q1-E1-E6
cccgggtcgacaccgaacacaacgtgctgtcattcgcggccatgatgaggacgaacgtcacgatgcccgcccacttgatgtacgacgggcaggacgacaacctgtttgagcacttcaccgcggtggctcaacggctgggcgtctacagcgccatatactacgcggacatcctcgactttctggtgcagacgtggaacgtcgccaacctcactgggctgtctggggaatggaggcggactcaggatttcctctggccactgggaacaaggttcagggccctggtggagccaactcagggtagggcgacacagttaccggttgttcctttcaactggattcatggtcggca

SEQ ID NO: 11261 - DNA, 414 bp, Triticum aestivum
  Clone ID: LIB31-047-Q1-E1-F2
ttcccgggacgacctcgcggtccgctctgccgccgggctggatccaaggggattggatcacctcctcagtctcggtggaggatctggagaggctcgtcgttgacgggctgatagcggatggatcttggaggctgccggaaggggagtccgagcccgcgccgcgcgacggcgagccggttctcctcacgactcatgaagaaagacgtttctcgcttcccccacatccattcttccacggtttcgtgaatttcttcggtgcgcagatccatcacttttccccaacaccactttgtaccttgccacatttgtttcgatgtgtgagaagttcctgggatgccacccacattgggggttattcaaacatatttttacctgttgatctcagtcggtgaacagagccaatctgactaatga

SEQ ID NO: 11262 - DNA, 113 bp, Triticum aestivum
  unsure at all n locations
  Clone ID: LIB31-047-Q1-E1-F4
gactcagcggttccctatcctcctgtccacgctaatgccgctcgattgttgttacagttgttaacttcatcaatgccccttgattgcgctatatagtnttgttcagtcgcgca

SEQ ID NO: 11263 - DNA, 436 bp, Triticum aestivum
  Clone ID: LIB31-047-Q1-E1-G12
ccgggtcgacaaactcaccgccgacaaccgggtctaccacaaggcctgcttcaggtgccaccactgcaagggcaccctcaagctcgcgaattacaactccttcgaaggagtgctctactgcaagcctcactttgaccagctcttcaagaggaccggcagcctggacaagagcttcgaaggcactccaaaggttgtcaagccagaaaggaatgttgggaatgagaatgctactaaagtctcgagcgcatttgctggcaccagagagaaatgttttggacgcaccaagacggtctatccaattgagacggttactgtgaataacaccatgtaccacaagagctgcttcaaatgctgccatggagggtgcaccatcagcccttcgaattacatcgggcacgatggaaagctcttctgcaagcatcaccaaacccagctg

SEQ ID NO: 11264 - DNA, 361 bp, Triticum aestivum
  Clone ID: LIB31-047-Q1-E1-G2
cgtgcgagattcgcgggacgactcgcagtctcatattaagtgaaccagaagcggtacatgcgatagaaaagaaaaacaaacccaagcaccagcacgacccttcctctcgatcccatctggacctttagtattctcgggaatatatctgattatgaagatgttccgtaatgctctggagccgacaactttttggactgctcgatgtctaataccaatgatactacgtttttgggtgttggctgtaggctggagctatcagtatgactgaaattttcatttcaccagtgtaaatttatacggacatcaatagacagcgacacgtcaatacttgtcaccagtttgcaatttgtagtacagtatg

SEQ ID NO: 11265 - DNA, 340 bp, Triticum aestivum
  Clone ID: LIB31-047-Q1-E1-H11
tggataggtatgtatggtggctgtttttagaaggatatgtggcgggtttatggtaccggcggaagttgcctaggactacagaggctaacaatggcgaaaaggtgagagtgcgtgtaatccatggactcaacattagtcataaagcactcatatacttattgcaccaatctattaatcatcaagacatagtactacacgcatgctcctatggggatactttgctacgacaatatcatcgctcgtccccgaccgccactcataatgaatacaagcaccatacatctcatgctccaacatcgttacataaggcttcaccatacgtgcatgctacggcactcac

SEQ ID NO: 11266 - DNA, 408 bp, Triticum aestivum
  Clone ID: LIB31-047-Q1-E1-H2
ggacgactctcgcgcgtcacctgcacacatgatccgatcgagccagcctagatcaagacttgaaccacaaagcaacctagacgataccagagagagagagagagagagagatggtaagtgtagtgcagtgcacagaccgttatcgtcagcgtcctggatcatcaacctgacctcgtcgagcgtaaagtgctcgccggcctcgatggccagccgctggatgtccatgtccggcctcgatggcctcatctgcccgaaagatgacatggtgagtaacccccaatctgggacacctcagacgatgacagaagagagaggaggagtcatgagactgtgatagcctggttttttgccttctctctttttttcggactttcttttgcatctactttggattttgagttttgagtc

SEQ ID NO: 11267 - DNA, 387 bp, Triticum aestivum
  Clone ID: LIB31-047-Q1-E1-H4
cgacgcaatattcggcgactcttacgcaatagcattgtatttggaggacaagtacccccaacgtcctcttttgcctcaagaccttaaaaagaaggccctgaatatccagatagcaagcattgtgtgttctggtattcaacctcttcacaatctcaccttggtgagatttatcgaacagaaggttggaacaggggagagcatcccgtgggtccagcaacagattgatataggtttcacagctgttgagaacatgatcaaaggctgtgctgggaagtttgctatgggatatgagatccaactggcatatgtaatccttgcaccccagatttttgctgcggtgactcgttaacaaacggacatgtcgaactatcccaccctcgcgaggct

SEQ ID NO: 11268 - DNA, 262 bp, Triticum aestivum
  Clone ID: LIB31-047-Q1-E1-H6
tcgcgggacgatttcgcggtcgacagcagacgtgatcgcggtcgagttgtcataagtctatcatagatcttaggctcgaaacatagtatctcaatggatatcgctcgctcgatgattctcaattcagatgttcgcgctcctcttcgtgttgatattctcgaggttactctttttgtggcgtgtatgatcatctgcactgcagtattgtttaagatcagattggtgtatgggtactatttgtatcgcatcagtcggcctttaa

SEQ ID NO: 11269 - DNA, 440 bp, Triticum aestivum
  Clone ID: LIB31-003-Q1-E1-A6
ctgccggtaccggaccgaaattcccgggtcgaccccttctacatgcgtgccaagatcttgggcagcgctggggaccggcaagtcgcgagttcttacctcgaaggcgtcattctggcaaaccaagataaggataacttcctcgtgccttactttcccgagtatgtcctcccctcaaccggcccgtaacatatgaattcttacatttcgatcgtttttcttttaacattccgtgttttctgcagtgacacacgttgcacgctcatcctcctaagccccaaatattctatggccacgtatttcgacccgaaccgtcagtcaaacgtagactacacaaatgtcaagaaggttcttgatgatgttctccccggctacgcccaatctggaggcaccttcaccaggcctattcgtaagtacggcaagcacgtgttctcccacaatac

SEQ ID NO: 11270 - DNA, 359 bp, Triticum aestivum
  unsure at all n locations
  Clone ID: LIB31-003-Q1-E1-A7
atctgccagtacttctactggtctctccactacgccagtgggaaggagacggcggagttcccgatcgagccagaaataacgctggagctgatgatggctgcaaactacctcgacacttagcctggaaaactgcatggttgttgacaagatgaatccatcgtccatttgggttcattcagtagaagatgcgatgttccaccattgtgcttgccatgtctcagtatatgggtttagtaaactataaactactaaggttgcgatggatgtattgcgcggttagtagcatgaatctgtcgtttctggacttaacagcttggccgggatcagatcntgttgttgtgtcatatcaatcaaaactg

SEQ ID NO: 11271 - DNA, 457 bp, Triticum aestivum
  Clone ID: LIB31-003-Q1-E1-A8
cctgccggtaccggaccgagattcccgggtccactacatgacacttaaccattatttgggcctagaggaaggcatagggaagtaataagtacatgatgggttgctagagtgacagaagcttaaaccctagtttatgtgttgcttcgttaggggttgatatggacccatatgtttaatgctgtggttaggtttaccttaatactccttttggtagttgcggatgcttgcaatatgggttaatcataagtgggatgcttgtccaagttagggcagtacccaagtgtcggtccacccacatatcaaattatcaaagtaccgaacagaaatcttatgaacgtgatgaaaactagcttgacgataattcccaatgtgtcctcgggagctcctttctcattattagatttgtccagacttatcctttgctacataaaggattgggccaccttgctgcacttta

SEQ ID NO: 11272 - DNA, 140 bp, Triticum aestivum
  Clone ID: LIB31-003-Q1-E1-B11
ggtccgaaattaccgggtccacgaccactggccacctgatctataagcttggaggcgttgacaagcgtgtgatcgataggttcgagaacgaagccgctgaaatgaacaagatgtctttcaggtacgcctgggtgcttgac

SEQ ID NO: 11273 - DNA, 461 bp, Triticum aestivum
  Clone ID: LIB31-003-Q1-E1-B8
cgcctgccggtaccggaccgaaattcccgggtcgaccttgcctgccttctcatctaccaagtatctagggtagtactgcttcagtgaccattcccgtcattacagaagcacttagtctcgggtttgggttcaaccttgggtttcttcactagagcagcaactgatttgccgtttcatgaagtatcccttcttgccctttaccttcttgaaactagtggtttcactaaccatcaacaattgatgctccttcttgatttctactttcgcggtctcaaacatcatgaatagctaaaggatcatcatatatatccctaatatgtcattgttcatctcgaagctctagtagcttggtggtggtgactttggagaaacattactatcccatctggaagattaactcccacttgattcaagtgattgtagtactcagacaatctgagcacatgctcaatgattgagct

SEQ ID NO: 11274 - DNA, 316 bp, Triticum aestivum
  Clone ID: LIB31-003-Q1-E1-C1
ggtccgagattaccgggtcgacgacctcattgtggaggactcgtggaagcgtcaggttggcggggactaaagctggtagactgtttgaatggaaggctctgtgctgcaacaaaaccttgccctagtagctatatgcaatgcttagcactgaactgctgtgacaatgttatgttaccgtaacatgtgtgggctatgtctgcccattgtgttgtgctactactgtaaaccaattgcgtggttgcgttagtttgcttggaccattgcttgtatgcagctacaagttgctaatgaagtacctactctaacctccttttgt

SEQ ID NO: 11275 - DNA, 428 bp, Triticum aestivum
  Clone ID: LIB31-003-Q1-E1-C2
ggtccgaaattaccgggtccacggcggcgtctggatccaggactccaacatctggttgcgacaaccagatagaaaggaaagggggaaaaagagggagagaagcaaccgtgagtactcatccaaagtactcgcaagcaaggagctgcactacatatgcatgggtatatgtgtaaagggccatatcggtggactgaactgcataatgccagaataagagggggatagctaatcttgtcgaagactacgcttctggctacctccatcatgcagcatgtagaagagagtagattgaagtcctccaagtagcatcgcatagcataatcctacccggcgatcctcccctcgtcgccctgtggaaaagcgatcaccgagttgtctgtggaacttgtctgggtgtgtcttattaagtatccggttccagttgtcat

SEQ ID NO: 11276 - DNA, 400 bp, Triticum aestivum
  Clone ID: LIB31-003-Q1-E1-C3
ggtccgaattaacgggtcgacgccttctacatgcgtgcaaagatcttgggcagcgctggggaccggcaagtcgcgagttcttacctcgaaggcgtcattctggcaaaccaagataaggataacttcctcgtgccttactttcccgagtaagtcctcccctcaaccgccccgtaacatatgaattcttagatttcgatcgtttttcttttaacattccgtgttttctgcagtgacacacattgcacgctcatcctcctaagccccaaatactccatggccacgtatttcgacccggaccgtcagtcaaacgtagactacacaaatgtcaagaaagttcttgatgatgttctccccggctacgtcaaatctggaggcaccttcaacaaggcctattcgtaag

SEQ ID NO: 11277 - DNA, 436 bp, Triticum aestivum
  Clone ID: LIB31-003-Q1-E1-C4
gggtccacaatgtaccgattactcatctttttatgagaacagttattcaagcactcgatgctttcccagctttggttgattttgtcatggggatactttccaggcttgtcaataagcagatctggaaaatgccaaagctgtgggttggcttcttaaaattggcataccagacccaaccacgctcttttgatgttttactacagttacctccaccacagcttgaagttgcattgaataagtacccgaatcttccatcacatctttcttcctttgttaatcggcagaacttgcacaacaagttgcccagacatactttgaatattttgggcttccttaacgaaccacagcaggcaccaatgccatttgcgcccgctgcattacaaacagcagacacgacttcctctcttcctggtgcaaacataatgtgaaatctgat

SEQ ID NO: 11278 - DNA, 348 bp, Triticum aestivum
  unsure at all n locations
  Clone ID: LIB31-003-Q1-E1-C5
atctgccagtacttctactggtctctccactacgccagtgggaaggagacggcggagttcccgatcgagccagaaataacgctggagctgatgatggctgcaaactacctcgacacttagcctggaaaactgcatggttgttgacaagatgaatccatcgtccatttgggttcattcagtagaagatgcgatgttccaccattgtgcttgccatgtctcagtatatgggtttagtaaactataaactactaaggttgcgatggatgtattgcgcggttagtagcatgaatctgtcgtttctggacttaacagcttgggcgggattagatcntgttgttgtgtcatatc

SEQ ID NO: 11279 - DNA, 447 bp, Triticum aestivum
  Clone ID: LIB31-003-Q1-E1-C6
taccggaccgaaattcccgggtcgacttccaccaaagcgatatccatcatctcatcgaaagacgggacacctttgcctctatcaagtggtatcagatttccaggttgctcggtgagattttacagtttttcgtagtttagatcgagtctgttcttcatacctatagtccacgaaaaagccaaaaaaaattagggttagttcatcccatccgaaccaatctgagccttgcataatcttttctgtatttgctttgttgaatttgcggttgcatcgtcgtgtccagttactggtcttagcgtctagtcttttagagtttcgagttctgttcacaggttgtcacgtcgccgctgccatatatcaccatcgcatcatcatcgtcgctgttgccatataccaccaccacatattcaccgccaatccgaatccatatacgccaccacatatccg

SEQ ID NO: 11280 - DNA, 230 bp, Triticum aestivum
  Clone ID: LIB31-003-Q1-E1-C7
ttcccgggtccactaatcgccgagcacacatggctcgcggcgacttgactattcacgactcagaatgcatggtattcggaagcttatcctttaagccaagacattctttccttgatgcaggtaaaacgatgtcacatgcttggctagatcaatggccatccatcatctatcataaatcaaggtatgttaagccagacttgcacattcttgggacagatgtatcttttcat

SEQ ID NO: 11281 - DNA, 399 bp, Triticum aestivum
  Clone ID: LIB31-003-Q1-E1-D1
ggtccgagattaccgggtccacaacaagtcgccaaatgatccattccctgcagaatggggggttggttcaatatttggtgccgagtgtgagaagcgtggtatgcttatcagggtcgctggggataacatcatgctgtcacctccactaataatgactcctgatgaagttgaagaaattgtgagcaaatatggcggggccctaaaggccacagaggaaagaattgaggagctcaaatcagccaagaagtgagcaatgccaatttgctgaaagcctctagtgatgatggtgacgacaatgtacagagtgacttgaacaaataaataccaataataacaccgtgagcctgaaaattgatcctgatgtggaaatttcagttcttatttaccatctccagtcac

SEQ ID NO: 11282 - DNA, 435 bp, Triticum aestivum
  Clone ID: LIB31-003-Q1-E1-D11
ggtccgaaattaccgggtccacaactggcttaaaaaaatacacagggtgtgcccgttgtgtcgtggggacgtctgcgaaggtgttgcctcttgaagaccttgggcaccggctcacgccctcaatgcgcctcttgaagatggtatggccggcacatctcttgcagccatggacgaagctgtttggttggtctggagagggctggttacccattgctgaagcatgcgatttcatgcattgattcgacatgtcaagttcccacaatataacaatgacctgtacatatcttttgtagccttatcccatgtatgacatcatgtacatatgtgcgaaaatttgatccgattccaccatattcgagatcaatatgtatccgccatgttacaatgatgaatccaagtcaatctctccatcaggaagatacatatttttaatgc

SEQ ID NO: 11283 - DNA, 432 bp, Triticum aestivum
  Clone ID: LIB31-003-Q1-E1-D2
ggtccgaaattaacgggtcgacacggagaatgatatgcatctccttggagacgacccttgggagtcatttgtcaatagtgtatggtacatcaagatactttcaccagaggatgtgcacaagttgggcaagcaaggaaatgatccacgttacctttcctaagtgcaagatcattgtgctgtttctgggtccagcgaggattcgacagcacatggtagcacccttgctcacggcggtacaacatccccggaacctccgatcgtctcatcttcgtacctgtctcatgcgtgtgccccgtgcacgtctcgagagctccccgtccgttacctatctccgtccggtgcaagccaccgacgccatgaactgagatttctgtaggttcctcctgggaatctgtatcggtttaacttttatcctagatggtttgtacctcg

SEQ ID NO: 11284 - DNA, 391 bp, Triticum aestivum
  Clone ID: LIB31-003-Q1-E1-D5
cgcctgccggtaccggaccgaaattcccgggtccacactgaaagccgcatcatcccaggttcaagccgcaattcgaggcagtggttctggcaaaaatgctgttacagagggtgtggaagcatctcttatctatgttcgtttcaaggcagcagctggggagctaaaaccggttttcaatgagattgaaagtagatcctctaagaaagagtatgcgcagactctttcagaatgtcacagtttgttttgtgagcagaggctgtacttgatacgaggtacggtgcagcaacgcatttctgagtttgctaaaaaagagaccttaccttcttttacaaggtctggttgtgcctatttgatggaagcatgccagtttgagcacaagctttttgctcac

SEQ ID NO: 11285 - DNA, 453 bp, Triticum aestivum
  Clone ID: LIB31-003-Q1-E1-D8
cgcctgccggtaccggtccgaaattcccgggtcgacatggtcctgcacgcgatactggaggaggacgatacggaagaaggtgcgccacttggagaaattattctcagcaggatccagtttgaacttgacatagttggagatgtgatcgttgtggatgttgagaggggagtggctggaggagggagcagcggaggaggagagggcagcggtggtgatggaggatgtagccggagcagagggagaggtcccagaggagagggcggcgaaggaaggggagtgcgccgccggtgagggaggtgggttgaagagatcctcgaaagccatagcagctgataccaagttatgggatgaattatgtgtacactcgcattagctcacagagagattacatataggagggagacctcaacggctccaggaagttaggcacgtcctaagcgtgcatggctctat

SEQ ID NO: 11286 - DNA, 346 bp, Triticum aestivum
  Clone ID: LIB31-003-Q1-E1-E1
gggtcgagctcggccggcccatgtacggatgaaatggttgagaacaggaagcagatattgagcagggtcttcctcaaaaacctccagactgatgacactgtcttcaggaaggtgtctcgatctgttcactgcgcgttccgtgcagtcaccctaagtggcaacgggaccaagggcatgaaactcgccgacgcggtcctggggcgcatcggggctaccaagctcaccgaccgcgtaatgaaagcacctgacgtgctgatcacagtagcaacgatatcagaacacgttcactggcccgtggtacaatcatctcctcctaatgacgtgctttgtttatgctgccttcggt

SEQ ID NO: 11287 - DNA, 463 bp, Triticum aestivum
  Clone ID: LIB31-003-Q1-E1-E5
gcctgccggtaccggaccgaaattcccgggtcgaccaggctgagaaaatgggacttgactacatggatgttgaaagtctcaagaagatgaacaagaacaagaagcttgttaagaagctagccaagaagtaccatgctttcttggcatcagaggccataatcaagcagatccctcgtctccttggccctggtcttaacaaggcaggcaagtttcccactctggttagtcaccaggaatctcttgaagccaaggtcaacgagacaaaagctactgtcaagttccagctaaagaaggttctttgcatgggtgttgctgtaggcaacttgtcgatggacgagaagcagatccaacaaaacatccaaatgagcgtcaacttccttgtgtccctcctgaagaagaattggcagaatgtgaggtgcctgtacgtgaagagcaccatggggaagcgtgtacgtgtgttcaa

SEQ ID NO: 11288 - DNA, 457 bp, Triticum aestivum
  unsure at all n locations
  Clone ID: LIB31-003-Q1-E1-E7
agcctgccngtaccgatccgaaattcccgggtcgacgctccatttggtcctgaggcttaggggtggaactatgatcaaggtgaagacacttactgggaaggaaattgagattgatattgagcccactgacacaatcgacagaatcaaggaacgtgttgaggagaaagagggtattccacctgttcaacagaggctcatctatgctgggaagcaactcgctgatgacaaaactgctaaggactacaacatcgaaggtggttcagtgctccatcttgtgcttgctctgaggggcggtcagtagatgcaacctcgacgtggaccgtaaaggccatttctaccagaacttgtttgcagacctagatctgtgaatttgccggttgattgaagtgccatgtaattgacgcatttgtgaagtcagctgtcacctgtacttggatggaattgtttgaactatatg

SEQ ID NO: 11289 - DNA, 453 bp, Triticum aestivum
  unsure at all n locations
  Clone ID: LIB31-003-Q1-E1-E8
taccggtccgagattcccgggtccaccgacagaaggggaggtttgtcagctggtttactaaggcaagcgacctatacgacagctcgtcttggatccttcagggttttgacaaacaaagcaattgaggcaaatgatgggaagccattgccacttgttcagaaagcttttattggtctgactgctggagcgattggcgcatgtgtgggcagtcctgctgatttggcactcattaggatgcaagctgactcgaccctaccagcagcacagcggcgtcactacaagaatgcattccatgcactctaccgtatcaccgctgatgaaggcgtccttgcgctttggaagggtgcaggcccaactgtggtgagagccatgtcactgaatatgggtatgcttgcgtcctatgatcaaagtgttgagctgttcagagacanattgggtgccggagaatatcag

SEQ ID NO: 11290 - DNA, 397 bp, Triticum aestivum
  Clone ID: LIB31-003-Q1-E1-F11
ggtccgaaattaccgggtcgacgaatttttttataaaaaagaaaaaaatggaagaaaaaaaaaaccgaactagaaacatgtttttttcttacttctttacctatttttctctttacgagaggcacctcccgcggaagcaaatctttgcctccacgagaagcaaatatgtgtctcttgcagaaggaaaaaaaactctgaagcacaactgtgcctcttgcggaagcaaatctgtgcctcttacagaagctacaaacatatgcttccatgaaaagtaaatttgtgcctttagcgaaataaaaaagatgtgtttgtgcctcaagcgaaaggaaatcggcgcctatcgcggagtaaaaaaaagtgtttttccatgcaaaagaatcatttttcgtccaaaatg

SEQ ID NO: 11291 - DNA, 452 bp, Triticum aestivum
  Clone ID: LIB31-003-Q1-E1-F4
ggtccgaaattaccgggtcgaggaccacgaggaggaggaggagcagcctggccatgtggactagcttgccccgctggagcgcttgcaggagtagaatgccaatatgaagacgacttggcgagccgggagccactccgtggtggttatcctccagccaaatcgacccagggcgcgctcccgcggcgaagcgtgtggcacgaggagcacaataaaatgggatcggctaggtgtagtcaactgaaaattatatttccgtgtcacttgtttatatgtgtgaatgatgcgcagccacgaaagaacaaagcctgccggacacagctatgctatgccatgctactctcttgcgatttgctgtaattttggagggagaaagcgcgaggagagagagcttgtgagagagaccgtgttgtgtacgtacatgtcagagagatttaatgagagagagggagaga

SEQ ID NO: 11292 - DNA, 462 bp, Triticum aestivum
  Clone ID: LIB31-003-Q1-E1-F5
cgcctgccggtaccggaccgaaattcccgggtccacatcgagccagatacgcatgtcaagcaggcgatgaatgagatcaatgcagctgcaaggatgagggtggctgcaaacgagaaggcggaggctgagaagattgtccagatcaagcgtgccgagggtgaagcagaggccaagtacctgtctggcctcggtatcgcccgccagcgccaggccattgtggatggcctgagggacagcgtcctgggcttctcagtcaatgtgcctggcaccactgcaaaggatgcgatggacatggtgctgatcacccagtacttcgatactatgaaagagattggcgcgtcctccaagtcctcggcggtgttcatcccccatggccctggtgcggtgcgcgacatcgccacgcagatccgtgacggtcttcttcaaagccagtctgcctctgacaactagcagtttgcttcg

SEQ ID NO: 11293 - DNA, 430 bp, Triticum aestivum
  Clone ID: LIB31-003-Q1-E1-G1
ggtccgaaataccgggtcgacgccttcctcttcgattacgatggggtgatttggaaaggggacgagctcatccaaggggtccccgagacactggagttgctgcgaaaattgggcaagaaattagtttttgtaacaaacaactctaggaagtcgagaaggcagtattcaaagaaattcaaaacacttggccttgaagttactgaagaagagatcttcacgtcatcatttgcagcagccatgttcttgaagttaaataatttttctccagacaagaaagtttatgttgttggtgaggatggcatcttggacgagctcaagttagctggctttgaaatgttttggtggtccggatgatggcacaaaaaacataatgttggaggcgaactttcactttgaccacgacaaaaatgttggacctgtcgttgttggg

SEQ ID NO: 11294 - DNA, 378 bp, Triticum aestivum
  Clone ID: LIB31-003-Q1-E1-G10
gggtccagaccgagccagatacgcatgtcaagcaggcgatgaatgagatcaatgcagctgcaaggatgagggtggctgcaaacgagaacgtggaggctgagaagattgtccagatcaagcgtgccgagggtgaagcagaggccaagtacctgtctggcctcggtatcgcccgccagcgccaggccattgtggatggcctgagggacagcgtcctgggcttctcagtcaatgtgcctggcaccactgcaaaggatgtgatggacatggtgctgatcacccagtacttcgatactatgaaagagattggcgcgtcctccaagtcctcggcggtgttcatcccccatggccctggtgcggtgcgcgacatcgccacgcaga

SEQ ID NO: 11295 - DNA, 439 bp, Triticum aestivum
  Clone ID: LIB31-003-Q1-E1-G2
gggtcgacggcggagaagaagaagaagcaatggcgtccgggtggggcatcaacgggaacaagggccggtgctacgacttctggctggacttcagctcgtgcatgagccgctgccgccagccctccgactgcggcctcctccgcgaggactacctcgagtgcctccaccactccaaggagttccaacgcaggaacaggatctacaaggaggagcaacgtcagataagagctgctgctcgcaaggccaatgaagaagccgaaggagctcctgctgttgcagctcaccactagcatcgcttttcaattttttcttatgcttttgtttgctgcaagtgcttccatgttcggctatgagcaatgcaataattacctaaacattctaccctcccaactccatgacttgttctgagagcatgagttcgataaactaccttgggcat

SEQ ID NO: 11296 - DNA, 394 bp, Triticum aestivum
  Clone ID: LIB31-003-Q1-E1-G4
cggtccgaaattaccgggtcgacaactaatttaactgcattgacaactaatcatatttgcgcacacgttacatttaattctatcttggtggttgtttggataactagcatttggaacaagttttagcaaaatcagttttaagaggatttttagggaaaaaacagtttaagttgttggtttgtagagtgctttgtttgggcttaaaaacttcaaatatggtactagtttgggtgagactagtattgaatggattttcatctcacaaccgaatgtccacgagctcctactcggcctcctggttcccgaggtcgtgctcggcctcctgttcccgagctcgtactttggcctcctgtcctggagctcatactcggcctcctgttccacgagctcgtac

SEQ ID NO: 11297 - DNA, 370 bp, Triticum aestivum
  unsure at all n locations
  Clone ID: LIB31-003-Q1-E1-G7
agcctgccngtaccgatccgaaattcgcgcggtcgacactgaggaatgaaggctggctgtcacccccaacttctctgttgatttcgggacctagcctgatggtcgctccgtgggccatgatatgagacatcctgctggagactgcacctctgacagatggatctaagacgaagggtctccgacacaggcagctgcagatccatggtgttgagctcactgtgactaaaatgattgctacactgcctgcggtgttgtaagtgatgtggcatcacatggaatcagttcctgataggtcctctgacattggcatcatgggagcttgtaccgtaatgacatttgccgctgagtcagactctgtctatagcatgca

SEQ ID NO: 11298 - DNA, 352 bp, Triticum aestivum
  Clone ID: LIB31-003-Q1-E1-G8
gtccacgacagctagaccgggcaaggttgatgcgccagtatagctctgaagatggactggtggcagttggcggcggcagcctctaagagtgcgccggatcggtggatgtcctattcccggcatgtggcttggttgatgcctcaggtcttaatgttaggtttgactgccaggtctgtttggtattaggccaggactatcaacatcccttcatcaactggataggagtatcgacagatactgcgtagacggtgacttcacacttaccgccgtatttttttttagaagtttttttagataattaatacagtggttgtatgcatcgcccatatgcaaaagccggggtcttcctctt

SEQ ID NO: 11299 - DNA, 377 bp, Triticum aestivum
  Clone ID: LIB31-003-Q1-E1-G9
gggtcgacacattggtcgggacaaaaggggatgatggtgttactgtactaagtattcttttcatgtgtctagtgtctttatcccaacatgttgcaaagtaatggagtgggcatacgaggagtagacttcatttgatgggggcctgtctgtcagcccttgttaaatagtggtattcacctgtgtgtgttaccacagtgcgccctctcactgtaatttctcgctggtgcttgtgtataaaaccagtcattatcagtttagatgattgtggcgatggtgaacacaattgctgaattaattcaagttattgtaggagctgcccagttttgatcatgagctttaaaagacacagagataaaaaagcggccgctctagacgat

SEQ ID NO: 11300 - DNA, 448 bp, Triticum aestivum
  Clone ID: LIB31-003-Q1-E1-H1
taccggtccgagattcccgggtccacacgctcgtagtacatctgaagcgcgatctcgagctccaagttggctacttcatcagagatcaccagctcgaggatgcgacggccatgttcctctacttcgcccaggtggatacctgggccaaggaggcggtcgagcctacggaccagcgcgttggcatccagcgggccgtggacaaggcgaacggcggcacccatgcgaacggcaggcgtccggtgcaagtacgacacagccgacgtctggtgcaagtacaacactgagggcctctgcccactcctggcgaggaatgggggtactgacgggacgtgtacccagccgcgacgccgtgtcgatagcaggcaagcgccgatggatccgctcttgctgttcggcgtgctgtacctctcgctctgcggcgctccaacggtctcgccgggcggcgagc

SEQ ID NO: 11301 - DNA, 230 bp, Triticum aestivum
  Clone ID: LIB31-003-Q1-E1-H12
aattcccgggtcgacgcatctgtggcagataacaggggggtcgtggagctgtagcagccatatgtcaagaccaagcgtcggataccagaggttttcaactattgtgttcaaccatctagagtaagatcatgcttacgttgtggcttgttaaatattgtgacttgttaaataaagcttgtgagtttgccgcagaaaaaaagctccaatgcattggaaccggaccagattta

SEQ ID NO: 11302 - DNA, 444 bp, Triticum aestivum
  Clone ID: LIB31-003-Q1-E1-H2
ggtccgaaattaacgggtcgacgcacctcgggggaccatgacaagtggattgtgggcgcggcaggagccactgtcatccggcggcttcgcgcgtgacggggtggcagactcgcctgtcaatgtccttgcctgcaccaagctggttcagtcacggcaggcgtggtttcgatcacgcccacgtgcaacattttgcatgttgtcccgggggtgacgagccaggcagacccgccagtcggcgtcttctccccatgcttggctggtttgattgcaacatgcgggtcgtgcttcgctccatttggtttgattgcatattttcgaaatgtcgcttaaagacattggtaagtccaaaaaatatgttatggggcacatttttggccaccaaatatatgccgtctagttccctaaataatatagttgataattatcatgatacatgtgtttaca

SEQ ID NO: 11303 - DNA, 451 bp, Triticum aestivum
  Clone ID: LIB31-003-Q1-E1-H3
accggtccgagattcccgggtcgacgaacgtgaacctggagggggtgaacacctccgccgtcctcgccgacgcctccagcaccgtcgcaaccatcatcggcaagccggaggcctatgtgatggttgttctcaagggttcagtgcccatggcatttggaggtacccaggagcctgcagcctacggcgagctggtttccatcggagggctgaacgctgatgtgaacaagaagctgagcgccggcattgcttccatcctggagtcaaagctgtccatccccaagtcccgcttctacctcaagttccacgattcaaagcgctcagactttggatggaatggatccaccttttagacgcatcatatggcatggagccttgcatgaactccagagttcctaatattctgtccattgcctatttaaggagaaactgctgcagtaagacatcgtgtcag

SEQ ID NO: 11304 - DNA, 448 bp, Triticum aestivum
  Clone ID: LIB31-003-Q1-E1-H5
taccgatccgaaattcgccggtcgacagacgacagaagggcagaaagaccacaatagtcattactgacatccaaaggctcggcttggctaacctcaagtgaaaacatgaacttccggagtatgtcaatataactatattaaagaatgtatgtatgccagaggaagaaaccaaagctgacatgtcctaatttgacagtcaaagtaagtcaacgcattagaagacaagcataaggatgacaattatcaagactgccaaactgaagactgggcgggcatttatacggtgttgttagtaaaatacttgctcacttcagcacatcatgtctggaccctcagtttcaaggtttatcaactaattcaatttcaaaaatgaaattactataattttaacctattcattaaataatctgatccacgtgccgaatatccaaatttaatgctctcaaaa

SEQ ID NO: 11305 - DNA, 334 bp, Triticum aestivum
  Clone ID: LIB31-003-Q1-E1-H6
taccgatcctaaattcccgggtccactagctgtcggtgagcgtgggaaagcattccctctagtaaagatccaagcgcgccagggatggtgaggtcctttctcggatcgaattggcgagtagatatttcaccttcctgtctccaggaaggcctctggttcatcctgtacatctagcatggctgttcattgtattttagttctttctagtgagctcttatcagtgcagagaaatgatgctcttataagtggaaaataatgcaacattcaggccctgtttggaaactctggaatccagcgtttaattaatgccaaatgtatgatatgcaaaagaaaa

SEQ ID NO: 11306 - DNA, 391 bp, Triticum aestivum
  Clone ID: LIB31-003-Q1-E1-H7
cctgccggtaccggatcgaaattcgcgcggtcgacgctgcaccacgtgctccgcctccgcgggggcatcatcgagccctcgctccaggccctcgcccgcaagtacaaccaggagaagatggtctgccgcaagtgctacgccaggctgcatccaagggctgtcaactgccgcaagaagaagtgtggccacagcaaccagctgaggcccaagaagaagatcaagaactagagctcgtaaaaccgttattgccgctttcattgtctggataaatctgtagacataaaatgtttctgggttatcattttgctgctcatgtcaggatgttgaaccttgtttaactctagatgagtacttggcctcgttttaatatcataactgaagtgaaccgtgc

SEQ ID NO: 11307 - DNA, 289 bp, Triticum aestivum
  Clone ID: LIB31-004-Q1-E1-A11
gtaccagtccagaattctcgggtcgacctgcccaggtgggtgcagtccgtcgtgcgctctgagtggactgcggaggtgtttgacatggagctcctgaggaaccagagctccgaagaacagatgattcagcttcgacaacttgctatacactgcgttgcccaggtcccagacgcccgtccgacgatgtcccaggtcgtcgtgcggatcgaggagatcaagatgccaggtggaagcaccgaggaagctgataaggaagagcagagccccctgaatcagggggattaaaagg

SEQ ID NO: 11308 - DNA, 470 bp, Triticum aestivum
  Clone ID: LIB31-004-Q1-E1-A12
ctgcaggtaccgatccgagaattcgcgggtcgacatcaagggtcgcacattttattttttggattctttctatgatgagaatagctcatatcatatgaacataaaaaagaagattatctcaagctttatatgcacttggtacgaagctcggctccagccaatggatttcagtgcattccctactgtttaccctaaagtccctcaacaagataacgatattgattgtggcattttcactatgaaactaatgggatggtgcccaaggaatccaacccctatagttttttcaccaaaaaatgtcccagatgcaaggatccgatatgctgttgatctcatgttcagccactacaacactttggatgacgagaagaagcgtgtcaaggagttccgcctatagacatgaaaaagtgctgacagctcctaaaagacaccactcacaatgacaataggagctatatcaagagtcatat

SEQ ID NO: 11309 - DNA, 461 bp, Triticum aestivum
  Clone ID: LIB31-004-Q1-E1-B10
gtaccggaccgagaattcccgggtcgacagcagtcgtcgccccgccaaggtattggttccgcttcccgcgccgtccccagtactgagattcgactgaaaactaggttccggttcataaggtggttgcgatagggtctgtatagtcgaggcatttgtgatttgatcgtgcactctgatgcgacttcgaggccgtggtttaggtctagtgacgtcgttctgattttatggcaatgtttggttccttgagattacaaagttatattcagtttccattgtcggttcgccggtgaaaatagagttttgatctgtatgtttacgattctagtgatctaatttatgctttgtgaattatgagtcagattaattgttgtttgacgactgttcgcattattgtttttctgaacttgtagtacgttgcaccgtcaggggtttgatttatttattttataaaccgtggagta

SEQ ID NO: 11310 - DNA, 354 bp, Triticum aestivum
  Clone ID: LIB31-004-Q1-E1-B11
gggtcgacaacttcaccagtgcatccagagcccgtgatatgatacgctctgtcacacatctgactcctgtagatcgtcctcaaatgagccaccacacctacctattatgggatttccatacccatttcggaatatattggcatgcaactttcgaccaatccgtttatcaagacacattcatcactgtcatattgcttaccaggatcatgtacttgacatagtatttgtcggtcagccatcgtgtacaagtccttcaggcatgtcactcgtggatcagtgcttatcacggttcagtgccggatgcattcataaatagtcatctttggtctattatccatttgtatccattgagtt

SEQ ID NO: 11311 - DNA, 222 bp, Triticum aestivum
  Clone ID: LIB31-004-Q1-E1-B9
ctgcaggtaccagtccagaattctcgggtcgacttgaacctaaagggccgcacacttaagggaaggaacctattaggcttgatccgattccatgagtcacatgtgatcctactcggactacgatccgggtcgaacatgatttgggatttaggaactacttgaggcccaagtgttgacccaaggacccttcccaatcaaaattgagggtgaacacacaccatc

SEQ ID NO: 11312 - DNA, 427 bp, Triticum aestivum
  Clone ID: LIB31-004-Q1-E1-C11
attctcgggtcgacgtggcatgttaaatcccgggattgttagctgtggactcgactgggccggcccatcaggcacgaagcgagttttttttcttttaacttgggacctggtatagtatagctcatcccgctagccactactacatacagctatgagtgacactataagtggcccggtatatttaagcagacaccgaagtgttgaactttgataaaaatttaggggtatacaaatattcaagacatatacacttttggaaatgtccggacattgtataaagtgtgagcactttttgagaattctgaatactttaagaagtcaactattttttgaagaagcaatcaagtttgaataatcgaagacttttacaaagctgaagaatgcgaacaccttttgaaaatttgtaaactgggaactaattttgaaa

SEQ ID NO: 11313 - DNA, 396 bp, Triticum aestivum
  Clone ID: LIB31-004-Q1-E1-C12
cctgcagtaccgatcctgaattcccgggtcgacattctccaaaaagaaaccaatgagtgagctttcccagttacggtataacgtagcagtgatggtgaacgtagcaccactgtaaaccaccatggtggacaggatctctagtcatacggtggacctgctaatagcctacgtagacttgcgcagttgaactctaaggttggtcttcaaaggtaactcagcaatctgaacacgtgctcttgctttagtcgcgatgatatctcatgcaggtattgatcatcatcgtagcatctggatggtcattcgaaagtgacattcgatccgcagcagctacgtcgtcgcggtagatactgccactgaatctatgatgagtgatctagtcgccatggctagagatga

SEQ ID NO: 11314 - DNA, 445 bp, Triticum aestivum
  Clone ID: LIB31-004-Q1-E1-C9
attcccgggtcgacagacgacagaaaggggccaacagggacgtgactagaatggagattttcctctcactcgtgcgcttgttggaacccagttgtgatgggagtggatcaggagagaaccaagaaaatggaaaaatgcctcttgagattgcgcagcaccagattatcccagcgacaggccaccttagatgagtgatcgagcatgggcagcatcaaggcacctttcaagagctaagagcaggggttcagctcgcttctgcaatgactagcgttgtcagctcacgactagctggtttcttgtgacgtaccacggatctttctcacaaccgggcgtgcagaaatcctaacacagtagaaccatgaaggcatcgacaattggtttaacaaaatgatcactaagaagtgtttggattgtaaaatctgtgttcctgttttgttactggtgt

SEQ ID NO: 11315 - DNA, 460 bp, Triticum aestivum
  unsure at all n locations
  Clone ID: LIB31-004-Q1-E1-F10
gtaccgatccagaattcccgggtcgacagaagacgacagaagggcgttcatgattcgcttatagtgggttgcgtgagtgactgaaacacaaacccgagtaagggagttgttgcgtatgggataaagaggacttgatactttaatgctatggttgggttttaccttaatgatctttagtagttgcggatgcttgctagagttccaatcataagtgcatatgatccaagtagagaaagtttgttagcttatgcctctccctcaaataaaattgcaataatgattaccggtctagttattgattgcctagggacaaataactttctcgtaacaaaaagctctctactaaaactaattgagttgtgtctttatctaaacagcccctactttttatttacatgctctttattatcttgcanacctatccanaaacacctacataatacttctagtttcatacttg

SEQ ID NO: 11316 - DNA, 67 bp, Triticum aestivum
  Clone ID: LIB31-004-Q1-E1-F12
tatggtgagtcgtattatacacatatagatggatgcggcagtgtattcggtcgcagttcggtgtaca

SEQ ID NO: 11317 - DNA, 438 bp, Triticum aestivum
  Clone ID: LIB31-004-Q1-E1-H10
ggtcgaccagaaccgggcacttgtggatgctcctgatatggtcaggtgccagatgaacttcaagcgtctttcgctgaccgacatcaagattgacatcaagcgtatccctaagacggcaactttgatcaaggccatggaggaagcagatgtgaaaaccaaatgggagaacagctcatggggtaagaagcttgttgtccagaagagaagagcatcgctgaatgactttgacaggttcaaggtcatgttggctaacattaagatgggtggtgcgatcaggcaagagcttgccaagctcaagaaggatgttgctgcttacattatcttagtggatggcatgttgagttttttgttccaagttggatctgctctatgttccagtgttcttaaagccagaattagtacaactgttttcggagaactacttcatattttgtcatg

SEQ ID NO: 11318 - DNA, 441 bp, Triticum aestivum
  Clone ID: LIB31-005-Q1-E1-B12
taccggtccagaattcacgggtcgactcgaactgcaactccaagtcgtcgacgtcactgcaactctatggtgttttatgagagagcgaatagttgcatgtctgctactacgcagacaactgcaagtgtcaccccaggctgtagctccatggtgttttgtccggaggggcagttgcatgtgtgccactaggcatgcatatgcaagtgttcccctgactgcaactctgtgttgtttttgttgggggggctaggttagttgcatgtttgtcattaggcacacaactacaaatgtggccccatattgcaactggatgtgtacaatgtgattgcaactcaacggtatttggtatgggaggagaagttgcatgtctaccaccagacaaacaactgcaacttttatacccccctttctcgactacaactgtatgccatcaatatgact

SEQ ID NO: 11319 - DNA, 330 bp, Triticum aestivum
  Clone ID: LIB31-005-Q1-E1-C11
attcacgggtcgacagaagacgacagaagggctggatcgattctacccaccggctaaacgcgtaaatgtacgcatgtacagacgtgcttctgatctattcccggtgagaaacacacgcgagacacacaacacacgccatgcagaagaagttggcgaggacgatgcctggaacgaagcacgggacatggagatcgttggcggactgggcggcgagctggagcacggacaggagacggtggagctcgtacggggcgggagggactacatggccgcggcttgcaggtgagcacgtggcagtcattaatttgatctaggtcagcactcccagcc

SEQ ID NO: 11320 - DNA, 397 bp, Triticum aestivum
  Clone ID: LIB31-005-Q1-E1-E10
tctagaattctagggtcgacgacttatccaacatgctcgacttcggctccaaagacatcgacggtatggacgagatgcaggagaagaacaggaaccattgcccacagggcgctggactgccacctcatcatatgatatatacatggtggacacccccaaagaaagcaatggcaataaggcaacggaggataatcccctcgagaagcaatctaagcaccgacgtcatcagcgccatagcaaaagtagcgataccggcacaagagacaataacactacggatagtgccgaagacaaagacaatgccctccagccagccttcgagcaggaggatgggcaagctagccctaagaaacaggcgacagatggagaatcagaagatgacagtcacatatccctc

SEQ ID NO: 11321 - DNA, 401 bp, Triticum aestivum
  unsure at all n locations
  Clone ID: LIB31-005-Q1-E1-E12
acgccttcangtagccgtccagaattctagggtcgaccaagccagagcccgtaatggcttgcggctgcacaggtaagcttccggtcaatggggtatccatccgtctcttcgtggctgggtgaagctttccgcaagatgtcatggcgcttctccatgcatcccgggcatccgctggtttccagggtgcccgtcaaccgtcctccacccagtagtgaattttgaagtccatcttgagcttgacgtcatggggttgtcatcatcttgactctcacatttcccttatgaatcactcaaccaaccccgtctacgagcatagcaaagtagactacatcgtcccgggcattgggtacaagggagaaagggtcatcctaccccatgaaactacttaggaacattactta

SEQ ID NO: 11322 - DNA, 370 bp, Triticum aestivum
  Clone ID: LIB31-005-Q1-E1-E9
gtctagaattcacgggtcgaccggaatcgtcattgtccctggatctggatttggccaggttcctggcacatggcacttcaggtgcacgatccttccgcaggaggagaagatcccggcgatcatctcccgcttcacggtgttccatgagacgttcatggcagagtaccgtgactaaactggtgtaacatgtgtgggattacatgcgagcctcgtggattttccctaggcgtttttgcccccgttgacagcagtatcatgtagacgagacaaaataaagcaaatccatggcttgtgtgtgtgatatactatatcagattctgaaacagattaccagtcagcacagaggtggccgggcgaggtgcgggtgggg

SEQ ID NO: 11323 - DNA, 434 bp, Triticum aestivum
  Clone ID: LIB31-005-Q1-E1-F9
taccggtctagaattccacgggtcgacaacgacgacacacgggaggcgaaggaaaaggtcgaagagcacaacgagcccgttcaagaacaatcacacggaggatggcggatccgtgttcttcggagaggacacgaacaacgggagccagcagttggaggggacggagaccgagaccgaggactacaccaagttcacggtgctgaagctgaagcaggagctgaccaagcaggggttcggcgcccagctgctgcagctgaagaaccccaacaagaaggacatcgtcgccttgtatgagaagcacgtcgttggcggcgcttgactgcctcttcctcaacaatatgtaacacatcattttaactcgtgtgctaattctagatttcgtgcagcgttgtgtgctggtgacacgttttaggtcagattgtgaaacagcatat

SEQ ID NO: 11324 - DNA, 438 bp, Triticum aestivum
  Clone ID: LIB31-006-Q1-E1-A5
ggtccagaattcccgggtcgaccagttgtgcgtgcgacatgacgtcctcgtctaccactaccacttggccacaaggccttgcgagcatttctccaggtttatcaacaactccaactacagtttcattatagtggacaccaccaacgatctaaaagcgctcaaggtttcgggcttgaaatgcccgaatcttgtcaacatccagcactactacaaggtctaggggagagacaacaacaaactgaactccctggttgacctcacctcggccatcgccgacccctactatacgaagatgaagtaagagagcaagaagtacaagaacgcctagcacagtgtttggcatgagagactcgatgaagaacacgtcaagtacatggccaaggatgcgtacacaagctacgagatgtacaggcggattgttgacatgaggaactgtct

SEQ ID NO: 11325 - DNA, 402 bp, Triticum aestivum
  Clone ID: LIB31-006-Q1-E1-A6
ggcatacaagagggtgatgttgtgacaatgtatgcttgggtctcacttcagcgtcgcagcgggctaactgccgcccttccccatgctcctttctatccgttccacagggaagagaacttctggctgcttctagcggacaccgcgtcaaacgaagtttggttatcccagaaaatcagcttcatggacgaggctaccgccataactgcagcgtcaaaagctatacaagatacccaggaagcattgggagcaagcccaaaggaaataggaattgcagttagggaggcggttgacagagtgaagaaaggcagtaggctggtgatgggcaagttccaagccccatcagagggcaaccacaacctgacgtccttctgcttgtgcgacgcatggataggctgtgacagc

SEQ ID NO: 11326 - DNA, 433 bp, Triticum aestivum
  Clone ID: LIB31-006-Q1-E1-A8
ggtaacggtctagaattcccgggtcgaccgagaagacgaaagaagggtaagagcatttgaagcacaatgctaagttctccttatcaattatccaaacaccgttgtatgggtaatgtcatgaaatttctctccccttacctaaagatttttctatgttatatcctgtcatggatatcatgccctgcttgtccttgggaaggaatacccccctgaaatatgtgtttaaacacattttcctttccattgttctgtttaacctgataatcacattttcatttccattgtcttgtttaacctttcttgaggtctatatgatctaagcagtaataatttgttgcttatgtaaacaccctggtgtacaaccttgtccgtaagacaatgttactattgctggtgacattttggtaaccaccgatgggacaaaactttgcct

SEQ ID NO: 11327 - DNA, 399 bp, Triticum aestivum
  Clone ID: LIB31-006-Q1-E1-A9
ggtctagaattcccgggtcgacgacactttctttgagctaatacgcaagcagatctgcaaccagatactttgtgttgtaagcgggattgtacatgcggtgcctactgtgatgaggcactgagatgaggaaggctgatttattattcataaatgcatatcctacctgaccagatctgctgtccaggtcgtaccaaacggctcctgtttcgtcttcggcgaggatagctatagtgacagatccgatgactttgcgtttgcatacattgtcccagtcataaactgttatggttacctatccagaaagtaaaaaatacatcacacattttagcaagcacgtctctggcatcaaatgcgtgccttggcatatcttgttttcgctgaaaacgtctcagtttcagc

SEQ ID NO: 11328 - DNA, 441 bp, Triticum aestivum
  Clone ID: LIB31-006-Q1-E1-B2
attctagggtcgaccatacattaccgagggggcagcagagccttgtcacatgggccaccccaagactgagtgaagataaggttaggcaatgtgttgactcaagacttggaggggactatcctcctaaggctgttgcaaagtttgcagccgtcgctgcattgtgcgtccaatacgaagccgacttccggccaaacatgagcatcgtcgtcaaggcgctccagcccctgctgaacgcgcgagcagcccaccccggggctgaacacgctggacgctaagctgcactccggccttttgtatgatataatagataaggaaaaatgagccatcaattgttgttcttgcggggcatgtggcaggcggtttttgtacatttgtgattattcttcccaagttgtaaccctcgagattctagtgacagaaatatttgattctttgtatcgg

SEQ ID NO: 11329 - DNA, 437 bp, Triticum aestivum
  Clone ID: LIB31-006-Q1-E1-B4
attctagggtcgacttccaccaaagcgatatccatcatctcatcgaaagacgggacacctttgcctctatcaagtggtatcaaatttccaggttgctcggtgagattttacagtttttcgtagtttagatcgagtctgttcttcatacctacagtccacgaaaaagccacacacaaaaaattagggttagttcatcatatccgaaccaatctgagcctttgcataatctttttagggttttgctttgttgaatttgcggttgcatcgtcgtgtctagttgctggtcttagagtctagtcttttagagtttcgagttctggtcataagttgtcacgccgccgccgcaccatcatcatcgcccctgccatctaccaccagcgcttatccgccaccgcttcgaatccgtatccatataccaccacagctgtcatatacca

SEQ ID NO: 11330 - DNA, 456 bp, Triticum aestivum
  Clone ID: LIB31-006-Q1-E1-B5
taccggtctagaattcccgggtcgacctttttttttattttttttttttttttttttgctctttttttcttttttttttcacttttgttctttttttttcaagccagttactagcgagtatacccaagatggcacgtacacaaattggccaaaagaagaaacaaaagtgccttggccgagtgctacagcaaggaacggagactatgaaagctagctagatgtgatttggagttgagattagctagtactagtcagccggcggagatttttggtgtggcgcgtggtggcagactaaacctgtgagatgtctggtgcctcgcgtaacgcaaagcctggtagtagatggcaaacacgcacagcgtcagacacagataactgtgcgtctggtcgttcgcgtaacgcctgagtgcggtaatgtggagagcgatcgtaatcaacacctggctttttttttgg

SEQ ID NO: 11331 - DNA, 416 bp, Triticum aestivum
  Clone ID: LIB31-006-Q1-E1-B8
caggtaacggtccagaattcccgggtcgacaaaagtaacagttacaggaaatggtgaggatggaatccgagccgttgatatctctagcgctcatcttgaccgtcgcttctctgaatcttcggtggctgcatctcttcgtcagtaaactctcggcttgggtcctgacagtggaaatgaacgtcccggatggatttcaattcaaaactaatcagtttcatctctactgtatacttagaagtactattaaaaaggagtccgcggttgtgatggtcgtaatggtttcatcacccctcccgtcccaccttgcttttcttcatcgaaacggttgtgcacatgaaagagtgtgcatgatggccctatctagtggtgagtggactgtctattgccattcatggatagcttgattggtttgtcgt

SEQ ID NO: 11332 - DNA, 440 bp, Triticum aestivum
  Clone ID: LIB31-006-Q1-E1-B9
ccggcaggtaacggtctagaattcccgggtcgaccgacagaaggggacacatccgatccgatccaatccagcccccctccgatctcgccgagaagtctccgattgaagcgaagcgaagccaaggctctctcctcctcctcctaagatgcagatcttcgtgaagacccttaccggcaagaccatcacccttgaggtcgagtcctctgacaccatcgacaacgtcaaggcaaagatccaggacagggagggcatccccccggaccagcagcgtctcatctttgctggcaagcagctcgaggatggccgcacccttgcggactacaacatccagaaggagtcgaccctccacctggttctcaggctccgtggtggtatgcagatatttgtcaagaccctcactggcaaaaccatcaccctcgaggttgagtcctcagacacca

SEQ ID NO: 11333 - DNA, 433 bp, Triticum aestivum
  Clone ID: LIB31-006-Q1-E1-C10
taccggtctagaattcccgggtcgactaccacagaaaacaatatctatctcatcgaaacattgggacaccttcgcctttatcaagtggtatcagttttcagggtgctcggtgagaatttccaggttttcctagattagatttattttcttacctattgtccaagaaaaagccacaaaaaagttagatctattcatcctttgtccaagctagtctgagcctttgcaattttcttttcattgcttgcatagttgaattatcggttgcatcgtcgtctcgagttgctggtcttagtgtctagttcatttagagtttcgagttctgttcacattagtcacgccgccgctgcatcgttatccctttcgctgtccaccagccatccatcaatttccaccacgtgctacccaccgttcattggcataatcatagttgaga

SEQ ID NO: 11334 - DNA, 428 bp, Triticum aestivum
  Clone ID: LIB31-006-Q1-E1-C11
gccgccaggtaccggtctagaattcccgggtcgacatcgtctccgacaccgctgcttcctctacgagatcgtctccaacaaactccatccacgaacaccaagtgcaccgacgtctagactaaaactctagatcaatttgtcatggatgctcatgttgcggaactgatgaaacctgaaaagtttgccggtgacaacttcaagagatggcagtccaaggtgcgtcactacctcctgtccaagggcctgtggtggattatcccacaggttaggccgctgactcgtcagcaggtaatggactttgagttagcaaacgacactgttgtggctgtcatcttgtcgctccttgagaaccagctctatgatgtataccatgggtacacctctgcaatagagctttgggatgcgctggatcgcaagtacgcggtctc

SEQ ID NO: 11335 - DNA, 432 bp, Triticum aestivum
  Clone ID: LIB31-006-Q1-E1-C2
attctagggtcgacatgcaacacaccatgcggaccttctgcaaaatgtaggagcggctcgggtcttgcgtgcagcggcggcagcaacatcagcttccattgaggccaaagtgttcgccagaattgtccttaggaatctggaacaccatcaggcagggacttcaacctgaaaacacaatggcgagcacaagcgcgactaattctccaacagggtatgacttctaacctttggccccagaatggatgcaaactcgcggttaagttgtcgccggcatttgaagctgccgcgcaagctgtgaccttggaacttccaccttgaggagaactgtcagaagagatgaatgaacgttcaaccggcagctgttgagtgtgcaattttcctgttgtttgtctgatgtgtaaaagtaacttaaaaagtgttagcgttagcatc

SEQ ID NO: 11336 - DNA, 447 bp, Triticum aestivum
  Clone ID: LIB31-006-Q1-E1-C3
tccagaattctagggtcgacttcattcctggccttaagaagataggtctccctaaatcgcggtatgaggggagactgactggaaaaggcacgcttggaagggactcaataatatgcagggacggatattcttggtctcaagcacactacatagttctacagaactctaccttggtgaccccgtatgtcgatgaacacaagaacagcctgcgctccaaacacccggagcagtgcgacgactggattacatgtgaacaaatcaggactttcagcagttggttggaagcacgtatcagaggtgataacactgtttgtgatgagctgtacttgttgtccaggggaccatctttgactgtattgatttggaaaggatacgagataaatgggaatacattttacacgattgaccaagatcaaaagagcaccaaccaaaacagcggtgtccgct

SEQ ID NO: 11337 - DNA, 445 bp, Triticum aestivum
  Clone ID: LIB31-006-Q1-E1-C4
cgcctgcaggtacccgtccagaattcaagggtcgaccctccatctcgtcctcaggctccgcggaggcatcatcgagccatccctgcaggcgcttgcccgcaagtacaacccggagaagatgatctgccgcaaatgctatgcgcgcctgcaccctagggctgtcaactgccgcaagaagaagtgtggccacagcaaccagctgaggcccaagaagaagatcaagaactagagtgccactagtcagtttcatgggccggttgaatccatcgcgtgtcggagtttatgctattatcgtctcgtttgtcgttgaaccttattttactttgctttcagcctcgtatcgttgtggtgataattgacagtattggtatatggtagcagacctataattttgccgtatctcctctgtttgttctgcgttctgtttaattattgactggttggc

SEQ ID NO: 11338 - DNA, 431 bp, Triticum aestivum
  Clone ID: LIB31-006-Q1-E1-C5
aggtaccggtctagaattcccgggtcgacggagaagaagcagttgaacacgatgcgggagatcaaggtgcagaagctcgtgctcaacatctccgtcggcgagagcggcgatcgcctcactcgagctgccagggtgttggagcagctgagcgggcagtcgccagttttctccaaggcgaggtacactgtcaggtctttcggcattcggcgtaatgagaagattgcctgctacgtgacaatcaggggtgagaaggcaatgcagcttctcgagagtgggctgaaggtgaaggagtatgagctcctgaggaggaacttcagtgacactggttgctttgggtttggtattcaggagcacattgatcgtgggatgaagtatgacccatctagcggcatctacggtatggacttcttcgtggttctggagcgagctgg

SEQ ID NO: 11339 - DNA, 466 bp, Triticum aestivum
  Clone ID: LIB31-006-Q1-E1-C6
ccggcaggtaacggtccagaattcccgggtcgaccccttctacatgcgtgccaagatcttgggcagcgctggggaccggcaagtcgcgagttcttacctcgaaggcgtcattctggcaaaccaagataaggacaacttcctcgtgccttactttcccaagtaagtcctcccctcaaccgccccgtaacatatgaattcttagatttcgatcgtttttcttttaacattccgtgttttctgcagtgacacacattgtacgctcatcctcctaagccccaaatattccatggccacgtatttcgacccggaccgtcagtcgaacgtagactacacaaatgtcaagaaggttcttgatgatgttctccccggctacgtcaaatctggaggcaccttcaccaggcctattcgtaagtacggcaagcacgtgttctcgcacaacacgacgttctggtgcgtcaagcagccg

SEQ ID NO: 11340 - DNA, 457 bp, Triticum aestivum
  Clone ID: LIB31-006-Q1-E1-C8
ccggcaggtaacggtccagaattcccgggtcgaccccttctacatgcctgccaagatcttgggcagcgctggggaccggcaagtcgcgagttcttacctcgaaggcgtcattctggcaaaccaagataaggataacttcctcgtgccttactttcccgagtaagtcctccccccaaccggcccgtaacatatgaattcttacatttcgatcgtttttcttttaacatcccgtgttttctgcagtgacacacgttgcacgctcatcctcctaagccccaaatattccatggccacgtatttcgacccggaccgtcagtcgaacatagactacacaaatgtcaagaaggttcttgatgatgttctccccagctacgcccaatctggaggcaccttcaccaggcctattcgtaagtacgacaagcacgtgttctcccacaatacgacgttctgctgcgtc

SEQ ID NO: 11341 - DNA, 341 bp, Triticum aestivum
  Clone ID: LIB31-006-Q1-E1-D11
ggtctagaattcgcgggtcgacagtactaacaaaggtgatgtagatgctgagacagagccggggagcaagggaggggaagctccatcagctgctggtgaagaagcagagccataagattggaggcgatggcatcggtcgttagaacttatgatggttatgagatctgtttctagacgcgaggtagaattttggtgtgcccctgaagttgggtagtagaggtgggtgttggtagcttttggcccggggctatctgtagtgttcaacgttattctgcaccttttgtttacgagtaaattgtatgtgctttgcacgtcacttaagtatataagagcatgggaaa

SEQ ID NO: 11342 - DNA, 414 bp, Triticum aestivum
  Clone ID: LIB31-006-Q1-E1-D4
tagccgtcgagaattcacgggtcgacttgcaactgggatgaaacaagctatgagcctgttccaatgaaaaggtagacttgcaactgggatgaaaaacaaaacacatgctctagttgtgagtagagggtgagcttgcaacttggacaactacgagcctagtcttgagtcgagagggacttgcacctgggacaactatgaaactacaagtcagttacgagtcaaggtcgacatccggcaagcggtcgcagcaatgcccagtagaagtctgaacagagcagacctagagtatatgactagaaaggaacaagtggatggggaaagaagagcgagaaaaaagatggtggcttgacttgttggctgtgtgcagcaaaaattactagaaaatgatccagcagaataaggacaacttccaac

SEQ ID NO: 11343 - DNA, 459 bp, Triticum aestivum
  Clone ID: LIB31-006-Q1-E1-D7
gtaccggtctagaattcccgggtcgacgcatttacggaccgtccgaatttccgcctgtcaaagatccgcatcataaatgggccaccatttcggcctgctaagaccagtgggttatttggcacaatcagggcctaatctcactttcggtctattaaagtcccatgttttttatgggctcgagatatttacacctgtaaacggcctatttttactgagggcccaaattatgtttaggcctgttaaaggccaactacgggcacatgcctaccagaaaaatatgaaagcttatgctgatttaggcccatatatttttagtggctacatgccaattttggcccgtagtcgtttttagcccaattggaatgggctcaacgaatattggcatgttgggctcctacgaagctttcggccgaatacattactaagataaacctacactatacaaaaatagcgtcgtaa

SEQ ID NO: 11344 - DNA, 316 bp, Triticum aestivum
  Clone ID: LIB31-006-Q1-E1-D9
gccgccaggtaacggtctagaattcccgggtcgaccatcgactcacaactaagggtgtgtgtatttgtcaagggtccccagttgcatgtcaaccatcaacttgcaactagggggtgtgtgtgttgtcgatgcccccagctgcaggtcgagcatcgactcgcaactaagggtgcttttgtgtgtttgtctagagtccccagttgcatgtcgatcatcgactcgcgactaggtgtgtgtgtttgttgagggtctccagttgcaagccgaccatcgactcgcaactagaggtgtatgtgtttgttgagggtccacagct

SEQ ID NO: 11345 - DNA, 423 bp, Triticum aestivum
  Clone ID: LIB31-006-Q1-E1-E1
tccagaattctagggtcgacttccatggcagggtcacccgctccatcggctccctctccggcgggatgtactagtcagatttcatcccctacgtcaactcatacacagagatctacatattggccaagtgttcgtcgatctgcaagcctgtttaagagctggattggccggtccaattcaacacggagctgtgtgtatgttgaaacttttcgtccatcaagcgtcgcctcgccgcctccgaccgccccgacgacgcccttgccttcgccaacctccactcctccatgaggtgatttgtttcttgcaatttggaagaggaagatgatgaaacgtggttgttatctatcaatatgccttgtgttctggttgtacttcatagctagttacattgtattctgtactggtctggttgtatgaacacta

SEQ ID NO: 11346 - DNA, 297 bp, Triticum aestivum
  Clone ID: LIB31-006-Q1-E1-E10
gtgttccgtcagacgattgcaggaaatatccttgttggcagctactgtgcattctctaacacgggtggactggtccatcctcacacatccattgaagatcttgatgatctgtccacactcctccaagtccctcttgtcgctggaaccgtgaaccgtggtaccgaggtcattgctgcgggcatgactgtgaacgattggaccgccttctgtggctcatacacaacggctaccgatctgtccgtcatcgagagcgtcttcaagttgagagaacgccagcccgcaacgatcgtcgatgac

SEQ ID NO: 11347 - DNA, 424 bp, Triticum aestivum
  Clone ID: LIB31-006-Q1-E1-E12
ggtctagaattcccgggtcgacattgttgaaattcagaaaataaaaccatctgctcggctagaggaagactttgttgcttgggggcctgaaaaaagtggagtttttactgtacgtagtgcgtataaactggctagtgatgaatgctcaaatcctaatgaagtctctacaagttcccggccggatggaacaagagaagcatggaaatttatatggcaaagttctgtaccaccgaaggttcagtcttttgcttggaggttagctacagattcgctagcaaattggacaaataaagtgaaaaggaacttggaagtctcaggtacatgccttgtgtgtggtatggaggaggaggactcgttccatgtgttttgcacctgtaatcatgctgtgttcctatggaaggccatggggaacgaatggacattg

SEQ ID NO: 11348 - DNA, 434 bp, Triticum aestivum
  Clone ID: LIB31-006-Q1-E1-E2
tagccgtccagaattctagggtcgacatccaaccagatgcgcaagtcaagcaggcgatgaatgagatcaatgcagctgcaaggatgagggtggctgcaaacgagaaggcggaggctgagaagattgtccagatcaagcgtgccgagggtgaagcagaggccaagtacctgtctggcctcggtatcgcccgccagcgccaggccattgtggatggcctgagggacagcgtcctgggcttctcagtcaatgtgcctggcaccactgcaaaggacgtgatggacatggtgctgatcacccagtactttgatactatgaaagagattggcgcgtcctccaagtcctctgcggtgttcatcccccatggccctggtgcggtgcgcgacatcgccacgcagatccgtgacggtcttcttcaaagccagtctgcctctgac

SEQ ID NO: 11349 - DNA, 465 bp, Triticum aestivum
  Clone ID: LIB31-006-Q1-E1-E5
ccggcaggtaccggtctagaattcccgggtcgacatcgagccagatgcgcatgtcaagcaggcgatgaatgagatcaatgcagctgcaaggatgagggtggctgcaaacgagaaggcggaggctgagaagattgtccagatcaagcgtgccgagggtgaagcagaggccaagtacctgtctggcctcggtatcgcccgccagcgccaggccattgtggatggcctgagggacagcgtcctgggcttctcagtcaatgtgcctggcaccactgcaaaggatgtgatggacatggtgctgatcacccagtactttgatactatgaaagaggtcggcgcgtcctccaagtcctcggcggtgttcatcccccatggccctggcgcggtgcgcgacatcgccacgcagatccgcgacgatcttcttcagggccagtctgcctctgacaactaagcagtttgcctcgccta

SEQ ID NO: 11350 - DNA, 442 bp, Triticum aestivum
  Clone ID: LIB31-006-Q1-E1-E7
taccggtccagaattcccgggtcgacgaatctctggatatggtgattcatgaaacccatggtatgatgtgtaaacacagccaccctcgcgaatggaagttgcatagcacagtaatcatcaccggtgatatggtcgatgattggttggatgatcagataattgagcccgaggaacaatgagtggttgctgaggctgtaaacccgcctccagttgaatacgcctggcccaacggagctgggatctttctcgaacacgaagcagccatagccatcaatgtcacgaacgccccatgaattgtactgcatgtggtttgatgtaatggtttggtcaatttggtacgtgcgaatgagcatcaaatgaccgccgtcagctgaacgagtgataaaccaccacccattgaccggtatgattccaggtcctggaatcatgaagcccagcacat

SEQ ID NO: 11351 - DNA, 448 bp, Triticum aestivum
  Clone ID: LIB31-006-Q1-E1-F3
attctagggtcgacgaaggactacattcaagtggaccaaccaattccctttggtttaataaacgtgaagccagtgtccaagctcctgaagacagatttctagaccaagaccgccctagcaaaagtggcatgatatacaatacatcttacaatatctgtcacagcaccatcaacaacatacagattgtcttcatcttcgttatcgtcgtgactcccctggattttcgttgtttgttgttaaatttatctccctccgtagtagtatcgtgcccccccgcactaatctgtgcctagcagagctgagccgagctgaagtagtagggctgtgttgttgtgctccatccatgtcagtgtacatatgattagcccgtgtaaagctaagttttatatgccgtgtaatgtggtagtgtcgttgggtcagaggaagttattgaccgcctgttgttttt

SEQ ID NO: 11352 - DNA, 456 bp, Triticum aestivum
  Clone ID: LIB31-006-Q1-E1-F7
gtaccggtccagaattcccgggtcgacaaatctcgacccattccgagaatgtttttctcccgctcacgaaacgagattagaggggtgcaacgggtgcatgtgggagtgtcggattgcgacacggacaatgagaaaaagaccggatgcatgagatgaacacgaatgcaaatgagatgcacatgatgacatgatatgaaatgcatgacatgaacaaaatgcaaaatgaaagacaaaaacccaaccacgaaggaaatatcatatcacatagccggaaatggcaagagttggagttacaaataaggaaagttacatccggggtgttaccacactccaccactacaagaggatttcgtcccgagatctaggactgaaagaactccggatatttataacagatctgatcctcgtgttcctaggtggcttctcggtcgaaatggtgtgaccacttcacgttca

SEQ ID NO: 11353 - DNA, 425 bp, Triticum aestivum
  Clone ID: LIB31-006-Q1-E1-F8
tacaggtctagaattcccgggtcgacgtcgaggaagaagatggacacgccggagatgaccgtggtggcctccgtccacgcaggcaatggcgaagctctcggcggtgccctctgttctctgtctctaaaggaagaaggagaaacagaggaagggaaagggtggcggcggcgagagggaaaccctaggggcgcgggttgctggatttataggagggccaggaagcatcgaggggtcgcggtgaaaccacggtggccatgtgtgggcacccctagaggttttactgtgagagaaaagagatcaggaggaggaagaaaaaacaggggaaggagaggctgcaggtggggcctggacgggtgtccaatgtggattcaccacgggagagagcgaggggggctgcgctgaggctcctgctggactggcctggt

SEQ ID NO: 11354 - DNA, 344 bp, Triticum aestivum
  Clone ID: LIB31-006-Q1-E1-G3
cgcctgcaggtacccgtccagaattctcgggtcgacatcgatggttcgttcagtgggaaatcgatcctacacctagcctaacggcctaaccaccgagctaacaaagggggaggggtgctgcttaccggcatcggagacgaggacggcgtatggggagccatggcacagacaatgtcgaacaaacggtggccaacagcaaggggagcaccagatccgccgcaaacaccgccgcctcttccgccgccgccgcctctacgttgatctaaaatcgcagcccgggccggtggtaaaggagtaagaaaaaaagggggtactggtaatggtgagccaattgaaaaaggggt

SEQ ID NO: 11355 - DNA, 460 bp, Triticum aestivum
  Clone ID: LIB31-006-Q1-E1-G6
gtaaggtctagaattcccgggtcgaccttgcagaggtccgttctcccggaatgcccaccccttattctttccgtaagtacgatgaagatcccgaagaatggatgtgtactacatcatgatgacctgaagcagagatatgaagacatcaacattatggattgaccgcttcgagaagagcaaccaagattcagaacgctcgttagaatttcgtaaccaaatcccttccccctcacttcccctcataaatctcgggacgagatttcttgtagtggaggagatttgtgacacccggataattaggctacagtaatcccgcgttaacgatgccacgtcacctcggttactgttgctaatctcgcgttagttcgaaaccgattcaaattcaaatccaaaatcaagcaaacaataaaagttttcaaatattagaactaaaatgtatggagtgagccaaataatgttt

SEQ ID NO: 11356 - DNA, 437 bp, Triticum aestivum
  Clone ID: LIB31-006-Q1-E1-G8
ggtctagaattcccgggtcgacaagttcagtatcaagatcctccgagaggaatttgagcgagccgccaatatattgcagtatgatccaaacccaagtgtgaagctctttgagccgtatgtgccccctcctccatctgggacccttgacgaggaagggattcttagtaccgcgggagctataatatgatgatactacaaacctgtatcatggaacccctttgtttacatgtttgttatggcttacctcagttgtgcatagctgtacaatagatgcttagttgtaaagtaactagatgtgatggtaggagtatgtacctgctatataagggtgtctagctattatcatcagatccagagtcttgattaattgtttcgcgtgtacaaggcgatgtttggacccgacgactgaatagattagtaaaataagtctgctgaca

SEQ ID NO: 11357 - DNA, 363 bp, Triticum aestivum
  Clone ID: LIB31-006-Q1-E1-H11
gcctgcaggttacggtctagaattcccgggtcgacagaaatctggtggagctaactgtgacctgcttgttgtggccctcccatggtgctcccggttgccacacgtccattcggattcttggggggaccacttctccttccgatggtgcggcatctttttgatccggacggatgtcaatgtgcccatgttattcatcagtcatgagtggacttgggctctcacctttcacattggtgccgccaacaggttttgtgctgcgtgtcgagtgcgagctgctttggcggacgacgacctcgatggatcaagctcatttcttcggttcaccttgagagttgcttgtgttgtactcggtctgcacacagg

SEQ ID NO: 11358 - DNA, 388 bp, Triticum aestivum
  Clone ID: LIB31-006-Q1-E1-H2
ggtacccgtccagaattctagggtcgacctgcacactttggaaggctctctggtgcaccgtcttgaaaggaaggcacaacgtcctcgggaggcgtctcaagcagcagtatccagtcgcccgggcttacgcaccccacctgattcttttcatggcaacaaattacgtagcgattgccggtttcgtcgcagtctctatcttgagcgaacaagctgccagagaggcgaggcatcctggggcacctgcgcctgcgccttcctctgtcctcctcccctagctcggagcagcatccaaattagaaaagtatactgctgggtgctaagttaaaaccaggttagcagttggtacttaattcagaatctttctcgcagctgggataaggtttgtggc

SEQ ID NO: 11359 - DNA, 444 bp, Triticum aestivum
  unsure at all n locations
  Clone ID: LIB31-006-Q1-E1-H4
attcnagggtcgactggtggacatcagttgaccatcagaggtgcttcggaaggccgtgaatcacattatctagaggttgttgggattgctgacaacgaccagtccatcagtgctgagagttgcaaagattttggtgacgactttgatgctgatgcgttcaatgggctgtgcaagcttgtggtgaacgtcaaggtgaaggaagttttcctgtagaggaagtcatttgggagatcaagcttactatgaagacagtttgtgttgtgtgtgtctcccggagtcgatgagcttattactgccttcgcttgtagtaactagtactagtaagcaatgcatagcagaccttaagtttatattatcgttgcttggatttaaatcctggaactggaaggttgcattttgcgtgatgcctgagctctttctcccattcaccttgatgaagaactg

SEQ ID NO: 11360 - DNA, 434 bp, Triticum aestivum
  Clone ID: LIB31-006-Q1-E1-H6
cctgcaggttacggtctagaattcccgggtcgacggcaacaacggcatcgtcggatccaccaccggcagcaactactatgtgcggatcctcagcaccatcaaccgcgagctgctcaagccgtcggcgtccgtcgccctgcaccgccactccaacgcgctcgtctatgtgctgccgcccgaggccgactccagcatatcgctgctcgcttcatcggagaagcccaacgtcctatattcggacattggaggatgtgatattcacaagcaagaaattcgggaggcagttgagctagcattgacacaccatgagttgtacaagcagattggtattgatcctccaagaggggtgcttctctatggtcctccaggcactggcaagaccatgcttgctaaagctgtggcacatcacactactgctgcttttatcagagtgg

SEQ ID NO: 11361 - DNA, 415 bp, Triticum aestivum
  unsure at all n locations
  Clone ID: LIB31-009-Q1-E1-A4
tctgcaggcaccggtccggaattcacgggtcgacgaggaggaggagcctgaggaggagctaggaactgaatatctggtgcagccgcttggccgtgctgaagacgaagagcattccagtgactttgagccagaagaaaatggtgatggtgctgaggacgaggagattgaggatgatgatgctgaggatggtgaggattctgtcaaggcgcaatcctcttcgaagaggaagaggtctggcgcggaggatgaagatgatgatgacggtgatgatgatggtgatgatgatgagaagcctccatcaaagcgatagtcaatttgttcttgctgatctggtatcttttctgcttgngccaagaaggaaaataatcctcacggagaaggttgttggtaaatgctgtagctttangacatctgt

SEQ ID NO: 11362 - DNA, 440 bp, Triticum aestivum
  unsure at all n locations
  Clone ID: LIB31-009-Q1-E1-A5
tgcaggtaccggtccagaattcncgggtcgactttcactgtaattatcaaactcctcatagacttatagatatctgtacactcacaaacgcattagtcccttaacctataagtcttcaatacaccaaaatcactaaggggcactagatgcacttacaagaataatttgaggtgtcttttccccgcagcaacgggcgcaccgtccttatcgttctttacccgcgagtctcccgcgccgtgtatttcgacccttccagagactacgagaaaaaggactacacccacataatgaatattctagatgatgctctccaaggcttcagcattagaggtggccacatgcagatcaagaaacagaggaacaagaagatgggtttcgcacataaaactaacttctcctgcatccatgtcccaaaaccaaccaagaatgatggattctac

SEQ ID NO: 11363 - DNA, 437 bp, Triticum aestivum
  Clone ID: LIB31-009-Q1-E1-A7
taccggtccagaattcccgggtcgacttccatcagtgagatattcatcatcacatcaacagacgggacacctttgccgctatcaagtggtatcagatgtccaggttgctcggtgagattttacagtttttcgcagttaatatcgagtctgttcttcatacctacaggccacgacgaagccacagtataaaaattagggttacttcatcatagccgaaccaatctgagcctttgcataatctttttagggtttttgctttgttgaatttgcggttgcatcgtcgagtcaagattgctggtcttagagtcgactcgtttagagtttcgacttctggtcataagttgtcacgccgccgccgcaccatcatcatcgccttgccatctaccaccattgcttatccgccagcgcgttgaatccgtatccatatgccaccaccg

SEQ ID NO: 11364 - DNA, 452 bp, Triticum aestivum
  Clone ID: LIB31-009-Q1-E1-B1
tggtacgtctgcaggtcccggtccggaatacccgggtcgaccccttctacatgcgtgccaagatcttgggcagcgctggggaccggcaagtcgcgagttcttacctcgaaggcgtcattctggcaaaccaagataaggataacttcctcgtgccttactttcccgagtaagtcctcccctcaaccggcccgtgacatatgacttcttacatttcgatcgtttttcttttaacattccgtgttttctgcagtgacacacgttgcacgctcatcctcctaagccccaaatattccatggccacgtatttcgacccggaccgtcagtcgaacatagactacacaaatgtcaagaaggttcttgatgatgttctccccggctacgccaaatctggaggcaccttcaccaggcctattcgtaagtacgacaagcacgtgttctcccacaatacgacg

SEQ ID NO: 11365 - DNA, 450 bp, Triticum aestivum
  Clone ID: LIB31-009-Q1-E1-B10
taccggtccagaattcccgggtcgaccagccattagcttctgaaagtaatgattacacaaactcctggcctggaaatacttttcaaccagacgttggtcttggatctatcggctttagctcttcttcacatgattaccagtcttctgctgcaaaacactcagtgccactatcagtggataaccatgtgcctgccatgggaacaggagctttgaacagttcttacagtcatcatatggcaggtagtgggaattcaacctctgttgctggtgacacgcaaccgatcatgagtgatgctttttatattgaccctgatgataagtttatgggcagttcttttgatggactgccttttgatttcatcggtattaatagtccaattcctgaccttgatgaactcgatgaactgccggatgacaatgatttgatgcaatatctgggaacgtaatcca

SEQ ID NO: 11366 - DNA, 402 bp, Triticum aestivum
  Clone ID: LIB31-009-Q1-E1-B2
ggtcctaaattcccgggtcgacctgctggaagagggccagttcttagcactcagccggtccgccatctaccagcagggtttgcgccattaccacaaccggaaggtcaagccaagatccttccaagaaggcgatcttgtgctccggctgatccagcgaacagccggccagcacaagctctcggcccattgggaaggccccttcgtcatcagcaaggccctaggcaacgattcctaatacctgatcgacgcacagaagccgaaggcacgcaagagggatgattctggcaaggagtcggaacgaccatggaacgccaatctcctaagaagattttacagttaaaagcagtatgtaccacgctaccttttgtattaagtacaagacaacggggcccccgaggtgca

SEQ ID NO: 11367 - DNA, 402 bp, Triticum aestivum
  Clone ID: LIB31-009-Q1-E1-B3
cggtccggaattcccgggtcgacctcccgttgcttctcggcaaggcatccaatggaagctttcccctatggtcatgggtcatgttctcgccctttctctttttcatccatctgtttgtgctgttgcggagatttgtgaaaaatgagcccttgtacaccgagatagcagacggagtgtatgttggaggctggccttcttcagttgaacgcctgccacctggtgaacccgcagtcatcgattgcacgtgcgagctgccaagaagctcaactatatccgagaattcatatttgtgtgtcgctacatgggatacaagggcgcctcagccaccacagattgagtcagcggtgcggtgggccgtgagaaagcggtcacagaacagacctgtgtatgttcactgtgcct

SEQ ID NO: 11368 - DNA, 380 bp, Triticum aestivum
  Clone ID: LIB31-009-Q1-E1-C11
ggtaccagtccagaattcccgggtcgacggatttgccgtcgagatcaccgacgctcaggcgagcgtgctgaggtcggccaaggaggtgagggtggtggagaagaaccaggagcttgattgaccagccaaacatccaggcagtcagaagcataatcatttagatgcttttggcatctgccatagctatggaagcttggtttagtataagccaaggctggagaacgttgatcagttgctattagtcaattgcttttgcggcgtaagtgtatcgatcggtgtgtgtttttgtgtgatctcccatggctttgttgactctaatgtcaagatcaagcttagctgctatcgttatatactagtacgtactactactactatttaat

SEQ ID NO: 11369 - DNA, 372 bp, Triticum aestivum
  Clone ID: LIB31-009-Q1-E1-C3
gggtcgacttccatcaatgcgatattcagcatctcatcgattgacgggacagctttgcatctatcaggtggtagcagatttccaggttgctcggtgagattttacagtttttcgtcgctaagatcgagtctgttcttcatacctacagtccatgagttttgccacaaaaaaaaaattagggttagttcatcatatccgaagcaatctgagccgttgcataatcattttagggtttttgcattgttgaatttgccgttgcagcctcgtgtcaagttgctggtcttagtgtctagtcatttagagtttcgggatctggtcataagttgtcactccgccgccgcaccagcatcatcgccttgccatctaggagca

SEQ ID NO: 11370 - DNA, 421 bp, Triticum aestivum
  Clone ID: LIB31-009-Q1-E1-D2
ccggtcctaaattcccgggtcgactccgaggagctcaccgtcgaggagcgcaaccttctatcggttgcttacaagaatgttattggtgcccgccgtgcctcgtggcgcatcatttcctccatcgagcagaaggaagagagccgtggcaatgaggaccgtgtcacactcatcaaggactaccgtggaaagattgaggttgagctcactaagatctgtgatggtatcctcaagcttcttgattcccaccttgtcccctcatccactgctccagagtccaaggtcttctacctaaagatgaagggtgattactacaggtaccttgcggagttcaagagtggaactgagaggaaggatgctgctgagaacaccatggtggcatacaaagctgctcaggagattgcactgaaagagctgccccgac

SEQ ID NO: 11371 - DNA, 426 bp, Triticum aestivum
  Clone ID: LIB31-009-Q1-E1-D8
ggtaccggaccagaattcgcgggtcgacgggaaaccaattgcgatgacagaggatcatcgagtagtcagtaccacagaacgagcgaggatagcgaaattagggaatcccctgaaagatggcgaaagccgtatatgtggactgaatctttgcaggatgcttggagacaagtttctcaaagagcaagatccaaggttcagtaaggaaccatatgtgagcccagtagttcagatctcgaaatcatgctcagcttttgcgcttatcgctagcgatggcttatgggatgtcattaccgcgaaaaaggcagcacagcttgtcctcgattataaggagaggaacatgggccaagaaatctcagcggacggagtagcagaccatgtgcttagtgaagccaggaatctgcggacgaatgacaacacatccgtgat

SEQ ID NO: 11372 - DNA, 225 bp, Triticum aestivum
  Clone ID: LIB31-009-Q1-E1-E1
gtccacgcaactccctaaagtgagtcgtattaccccaccttcctcgccgtgcctacaacatgttcacaactgtcaaaccggaagcgttcctggctaaatctacgtttcatcgctacgtagtcaatgttgcatgtcactggtgtgttttcacgctgccgcaatgctatgaaaacgcgatgcaagcagcttctcaaacttgtatcgttgtaacttgtatgacgccag

SEQ ID NO: 11373 - DNA, 429 bp, Triticum aestivum
  Clone ID: LIB31-009-Q1-E1-E3
cgggtcgacaattggacacagccacagaaattgctgcttcaaagggcgatgtccgcttggcagtcctgctaagccaggcaggtggatcgatgttaaatcgctcggatgttgctcagcagctggatctgtggaaaataaatggtctggacttcgattatattgaggaagacaggttaaagatatacgagttgcttactggtaacatacaaggcgctttacttgattcaccaatcgactggaaaaggtaccttggtttaatcatgtggtatcagttgtcaccagatacatcacttgatattatcattcggtgttatcaccaactacttggtgagggcaaagttccaaatcctgttcctgtatacatcgatgaaggacctctcgaggaagcaattcagtggtccccaggtgaccggtttgacataccttttt

SEQ ID NO: 11374 - DNA, 224 bp, Triticum aestivum
  Clone ID: LIB31-009-Q1-E1-E6
tcgtagttcaacgcaacaccctatactgagtcgtattagagccggcctgaccttgtcgatgacaaccaggacgtcttcatgcatgtgcccctaaggacctgcgttcgggagccgcaatcgtcggcattgagtctttaaatcactattgagaacctgacaccagatcgcactattgcattcacacgatgagaagacctacgttgtttcaagaagatgggcagatt

SEQ ID NO: 11375 - DNA, 389 bp, Triticum aestivum
  Clone ID: LIB31-009-Q1-E1-E8
actcgtgggtcgacgcgatgcccaatcgtgagtcgtatgatggtattgtcggcaaatatggtacccgttatggtgccagtttgcgtaagcagatcaagaacatggaggtgtctcagcactccaagtacttctgtgagttctgtgggaagtttgctgtgaagaggaaagcagttggaatttggggatgcaaggactgtgggaaggtgaacgctggcggtgtttacactatgaacactgccagtgcggtcactgtcaggagcactatccgtcgtttgagggagcagactgaagcataagttgctactaatgttttgtcctagtgaatcatctgggatttcgcagtttagacgataccttggattcagttccattggctgtttagtcaagga

SEQ ID NO: 11376 - DNA, 445 bp, Triticum aestivum
  Clone ID: LIB31-009-Q1-E1-E9
tgtcacacctgcaggcaccggtccggaactcacgggtcgacagcttgtgtggtcaacattggtgctcaagttacacaagtagtttgtgttgaggatggagtagctttgcctcacacagctttggcgcttccatatggtggagatgacatatccagatgcctactttgggttcaacaacgtcatcgcacatggccaaactttaaaaccgatcccatgaagaagcctatagatatgctaatgctcaacaagataaaagaggggtatagccagataaggagcggaagttatgatgctgtttctgttgttcattcatatgagcatgaaaagtctgttgggcatcagaagacaaggctgtcagctctcagtgttcctcctatggggcttctttatccccggcttctcattccagaagagttccctccacctccccgaccttggttccacg

SEQ ID NO: 11377 - DNA, 403 bp, Triticum aestivum
  Clone ID: LIB31-009-Q1-E1-F10
cccgggtcgaccattttcaccaatgtgaaacttccaaaagtagttgctgaagctgtcaatagatactggtccactctgaagattatctttgatcatcgggcatgggatacacggaccatggagtctctatgccgatcttgcaaatttgctgtaaggacatgtgggaggtccatgggaatcaccattggtgcaatgctgctagaaatccaaacactatatcagcaacacaatcagtcttgcttcctttacttatccagtgaagttattaagatatttggatctgatccatcttgtgcgagctatcttacatgtctgatacagacactctttaatcatacaatacaactgctcagaactattcaagattttacagctagacccgacatagctgatgattgccttc

SEQ ID NO: 11378 - DNA, 398 bp, Triticum aestivum
  Clone ID: LIB31-009-Q1-E1-F2
tcgtagtacgtcgcaactccctaaactgagtcgtattaatcgtggccgtattgcttcagaggaaagcagaggaagctggatgctctgatccgtacattcgggctcggacatatctcggtcaactggagcccgaaacacggcagtctacacgtcagccggaccacaagaagcaggcgcttgtcttgcctttccaaattccaaccccgcacgccaactcccttcctcggtcaagaaccgacggcgacatgttggccaccggcgagctgcagcccctggcgacccagccggatttcctcgagctggccgagcttctccggcgcaaagtcgcgggagagccgttgcccatcttcatccacgaggttaacgcctaccctgcagtttggcaaatacacgttaat

SEQ ID NO: 11379 - DNA, 393 bp, Triticum aestivum
  unsure at all n locations
  Clone ID: LIB31-009-Q1-E1-F4
gggtcgacatgccgcggatacagagcagtgtgcggggtgtccgggaggagagctgtttcagggctggctcttcttggcgccgctgcctcttgcgcgaatctcctcgccgtgcccatgccggtgcaggcagcaatgctggagcccgatgtcatcaggtacagaaagctggacagtggagtaaagcttgaagatgtagtcgatggcgaagggccggaggctcgggaaggcgatttagtgcaattcaactacgtgtgccgccgtgcaaatggttatttcgtgcatagcacggtgaatcagttcagcggcgagagtaagccggtgacacttcgactcgacgtgcaagaggttccangacaggatttctcttggcaattgacctttctgcagatgatt

SEQ ID NO: 11380 - DNA, 312 bp, Triticum aestivum
  Clone ID: LIB31-009-Q1-E1-F5
attcccgggtcgacacagacaattccatccgctgcaagtttgagaacctcaaaatccaatctagagccctattctgacatcttgttggaggggaacacgaccatggaggggttcatcatcctcattggcgctcctccgaagaggcacgaataattcaccacagaactatgggtccgtaagcagtagctaaatgggtgcgtccctctttttaatctcagtagaatgtgcaactctatgttcttggagatctacttcatgtaatgacgttttgcaatgcgttttttgggattccagtgaattgtggagtttacg

SEQ ID NO: 11381 - DNA, 216 bp, Triticum aestivum
  Clone ID: LIB31-009-Q1-E1-F7
gtaccggacctacattcccgggtcgacgaggtgaccgaaaacgacatcagggtcatgaaagttagtcctttcgcctactgaagcactggcatcatcaaggccatacacttagaccgccatcaatgaggcaaatatggacacacctacgtcgactgcacatccatgattctcggaggcgtgcgtttgcactgcactttaacctaccgacccgttttc

SEQ ID NO: 11382 - DNA, 400 bp, Triticum aestivum
  Clone ID: LIB31-009-Q1-E1-F8
ctcgcgggtcgacactagccggacgatcgttgcgatcaaatgcaaagatggaattgtccttggtgtggagaagctgataacctcaaagatgatacttgccgggtcgaaccggagacttcattctgtgcaccggaactctggcttggctgtggctggattagcagcagacggtaggcagatagtctcaagagcaaagtcagaagcagccaattatgaaaaggtatacggagaacccatgcctgtaaaggaattagctgatcgcgttgctagctatgttcatctgtgtacactctactggtggctcaggctttttggctgtggagttattcttggaagctatgatagggatgggccacagctctacatgatccaaccttcatgcctctcctataattatttt

SEQ ID NO: 11383 - DNA, 424 bp, Triticum aestivum
  Clone ID: LIB31-009-Q1-E1-F9
ccctgcaggtaccagtccagaattcgcgggtcgacaatgtaccgaatcctcttctttttatgagaacagttattcaagcactcgatgctttcccagctttggttgattttgtcatggggatactttccaggcttgtcaataagcagatctggaaaatgccaaagctgtgggttgggttcttaaaattggcataccagactcaaccacgctctttcgatgttttattacagttacctccaccacagcttgaagttgcattgaataagtacccgaatcttcgaccacatctttcttcctttgttaatcggcagaacttgcacaacaagttgcccagacatactttgaatattttgggcttcgttaacgaaccacagcaggcaccaatgccatttgcgcccgctgcattacaaacagcatacgcgac

SEQ ID NO: 11384 - DNA, 193 bp, Triticum aestivum
  Clone ID: LIB31-009-Q1-E1-G6
gcatgcgcgtagtactttgtttcgatgactaatagatttttgcaagaagtatgtcagttctttatgacgaatgttgagtccatggattatacgcactctcacccttccatcattgctagcctcttcggtaacgtgcaatggcctttctcaactcgaagattggtgcaaacttccgcggtgcatccaaaccccg

SEQ ID NO: 11385 - DNA, 432 bp, Triticum aestivum
  unsure at all n locations
  Clone ID: LIB31-009-Q1-E1-H4
ggtccgagaaatcccgggtcgaccaagctcgaagagatcaattcatatttgtggtcggcctcgctggttgtttgttcttttattttcggcagttagctgcatgctctggttgacctcatgcagtctcctcacggttctatgggcgcttctcattgctctgcttacaacggtacttcatgccagcttcagaacacctaatttgaaagcacgtctgaatacgttcagagaggaattccgagcagtttggcggaattatagtgagctctagagctccctcagtttcaaggtgataagatgtgcttagcgctgaagcttccctgctgtctgtgcattgtgtctgtgggagatgtacaaaggtgatacgcagttgtgattactggctcatttggaggtggaccaggaccgactctgtangtgatgctatgcctcggt

SEQ ID NO: 11386 - DNA, 444 bp, Triticum aestivum
  Clone ID: LIB31-009-Q1-E1-H9
cacctgcaggcaccggtccggaactcgcgggtcgacacatcacccaatcttgctccgaaagatttccggctgtttaagtttgttaatgatctccaagctctgattagcccccctgccaaaggaactccacttccgctgatcttacttggaaagtcgaagaacgcgatgctgtcaactttcctctttctggaccaaattgtttgggctgggagaacaggagtatacaagaacaaggagcgagcagaattccttggcaggattgccttttattgctttcttggatctaatacatgtactaccatcatcgagctagcggagcttcagcggctttccaaatcgatgaagaagttagagaaggacctcaagcaccaagagctgtacaagaacgagcagtatcggatgaagctgaagaagtccaatgagaggctggttgctctcaacaaa

SEQ ID NO: 11387 - DNA, 462 bp, Triticum aestivum
  unsure at all n locations
  Clone ID: LIB31-016-Q1-E1-A2
cctgcgacgtaccggtccgagattcncgggtcgacgagatgacgaagcgcaccaagaaggctggtattgtcggcaaatatggtacccgttatggtgccagtttgcgtaagcagatcaagaagatggaggtgtctcagcactccaagtacttctgtgagttctgtgggaagtttgctgtgaagaggaaagcagttggaatttggggatgcaaggactgtgggaaggtgaaggctggcggtgcttacactatgaacactgccagtgcggtcactgtcaggagcactatccgtcgtttgagggagcagactgaagcataagttgctactagtgttttgtcctagtgaatcatctgggatttcgcagtttagacgatactttggattcagttccattggctgtttagtcaaggattatctttgtacttggtgcgatgatgttctgttatgttattctcccaccctt

SEQ ID NO: 11388 - DNA, 419 bp, Triticum aestivum
  Clone ID: LIB31-016-Q1-E1-A3
ggtccgagaattccgggtcgaccatagagtgcaagtctctttcaagatcggagcttatgaagacactttggagtgtgatgtccttccgatgaccgtttgccacctccttcttggacggccatggcaatttgaccgaggtgtcatccacaatgggcgtacaaatcactatagctttaagatgaaagggaaggagtttgtgctacgacccatgtctccaagccaagtgatcgccgacaagcaagccacccatcgtggagagaatcgtgagcgagcgaaccaccaaaaagagagtgagtgccacaagcccaaattgagtgcctccatgatgagcgacacgacaaacttagttctatctgccaccaaacgtgagatgagagaaatgtgtgagaacccctcaagtgtcctacactatgtccttt

SEQ ID NO: 11389 - DNA, 451 bp, Triticum aestivum
  unsure at all n locations
  Clone ID: LIB31-016-Q1-E1-A4
cctgggcgtaccggtccgagattcncgggtcgacgactccaccggcgacgaggactcggacgacagttgcacgctgaggcgatcgaacgggagaagagccggctggacgcctggccatggcgttccggcggcgggagccatcaggatcaggtagcagcggaggagctcggctcgtcgtatatatactgtagaaaaagatagtttcagttcaggcgatggaattctgatggtatttttcaggtgttggaattctgatagacagagtgaattgtgttagatttaccatttggttagatgggtgaggtggtgtgcacatttggttgatttcttcatttttgagtgcaacaatgttgcagaaatgtagatactcagactctcaatgccgtgattatgaggataaggaatatcttcaggtcctttctgaaagttttaactgaccaagtacagttcc

SEQ ID NO: 11390 - DNA, 418 bp, Triticum aestivum
  unsure at all n locations
  Clone ID: LIB31-016-Q1-E1-A5
gtaccggtacagaattcccgggtcgaccccttctacatgcgtgccaagatcttgggcagcgctggggaccggcaagtcgcgagttcttacctcgaaggcgtcattctggcaaaccaagataaggacaacttcctcgtgccttactttcccgagtaagtcctcccctcaaccgccccgtaacatatgaattcttagatttcgatcgtttttcttttaacattccgtgttttctgcagtgacacacattgcacgctcatcctcctaagccccaaatattccatggccacgtatttcgacccggaccgtcagtcgaacgtagactacacaaatgtcaagaaggttcttgatgatgttctccctggctacgtcaaatctggaggcaccttcnacaggcctattcgtaagtacggtaagcacg

SEQ ID NO: 11391 - DNA, 432 bp, Triticum aestivum
  Clone ID: LIB31-016-Q1-E1-A7
gtaccggtacagaattcccgggtcgacaacttcatcaggatacactgtttgtctatgtcaacagttcgttttctccaagcccagacgagctgataattgacttgtataataattttgcaatagacgggaagcttgtggtaaactatgctttatcggcagcgtggggttaaaagattggatttgcgggaagaatcgaatggatcgaaaacgccgtttgaaatttgaccgttttactgtgtatagctggagttgtagttggtcagtcaaagaggcactagctctcacatatgttgatgatgaaagtaaaggttcttgcgagactgccttttctggcattgaactgtccaagtgttctctctctctacagtatgtttattggttcttgattcatgtcgtgtgtgtgattgggcctagagaaacggatggattttt

SEQ ID NO: 11392 - DNA, 457 bp, Triticum aestivum
  unsure at all n locations
  Clone ID: LIB31-016-Q1-E1-B2
cctgcgcgtaccggtccgagattcncgggtcgacctaccgtccgaagaggaaggataagagggctcaggtcagaggtgctcaaggctctgtgagtagagagaagcatgatgcatctgctgccaatgccagcgccacctcttcgaaacccaccacctcggccaaggctccagaaccaccaaagggttccaacaagtcccggaagaaaaagtcgaggtcttaggcgacaaagttgttatgtcacaaattaacagtatacaaaggacactgtccattttagtatcttgacttgatttttttgtgttatctgcattggattgccctgcgctgtgcttttagaaccatgtttatggtgacttgagattctagacttgttgcaaattttgttaaggctgtctgacttatctggttaaaaaaaaaaaaaaaaaaaaaaaaaaaaaagcggccgctctagaggat

SEQ ID NO: 11393 - DNA, 437 bp, Triticum aestivum
  unsure at all n locations
  Clone ID: LIB31-016-Q1-E1-B3
ggtccagaattcncgggtcgacctgaaggccgacaagaagaagattaaggccgctgtcaagaaaatgtacgacattcaggccaagaaggttaacaccctcatcaggcctgatggcaagaagaaggcgtacgtgaagctgacaccagactacgatgctcttgatgtggccaacaagatcggcatcatataagtcagagggagggtcctgcagtaggcgcttgtgtcgtggtttcttgtgttattggaattttgtagttgttacttagcaaaggggctcagtggctccattgcctaccatatcgctgcacactttcatgaatttgatgcaatcgaagtgacttgttgttgagctttgcgtttggtcttaccatatcggttggtttctttaccatcctttgacttaccatatttcctgtataatttcccggttttanaga

SEQ ID NO: 11394 - DNA, 460 bp, Triticum aestivum
  unsure at all n locations
  Clone ID: LIB31-016-Q1-E1-B4
cctgcgcgtaccggtccgagattcncgggtcgacttccaccaaagcggtatccatcatctcatcgaaagacgggacacctttgcctctatcaagtggtatcagatttccaggttgctcggtgagattttacagcttttcgtagtttagatcgagttttttcttcatacctatagtccacgaaaaagccaaaaaataaattagggttagttgatcctatccgaaccaatctgagcctttgcataatcttttctgtgtttgctttgttgaatttgcggttgcatcgtcgtgtcaagttgctggtcttagcgtctagtcctttagagttccgagttctgttcaaaggttgtcacgtcgccgctgccatatatcaccaccgcatcatcatcatcgctgctgccatataccaccaccgcaccaacttcatcgccgctgccatataccaccaccacatattcaccg

SEQ ID NO: 11395 - DNA, 408 bp, Triticum aestivum
  Clone ID: LIB31-016-Q1-E1-B7
taccggtacagaattcgcgggtcgacatgttcatcaacgtcggtgtcatgttgcatgtgctccatgtcatcgtcgtcctccttgtcgagagcaacatctccatctagttcatcttgtgtgtctggaagctcctgtgagctgttgtggtcgtaccgaccacggcaaccagttggccgatgtgtccgttctgcaacaaatggcgtgaattgcctcgcaaccgcgtcactgtcatatccattaagggacgtccaaccctcaaccaacttcccgagcacgctggtcattctggatgcaaactgcctaattatgtgctcaacggctgccctcgcctgtgcacgaaccaagattcaacactctgcacatcgtattaaagtcacgtgcacaggatcaacactgaccatacacaac

SEQ ID NO: 11396 - DNA, 450 bp, Triticum aestivum
  unsure at all n locations
  Clone ID: LIB31-016-Q1-E1-C3
ctgcgctacggtcgagattcncgggtcgactccttcaaggaagaggttgatgagggacttcaagcggctgatgcaggaccctcctgcgggcataagcggggcgccgcaggacaacaacataatgctgtggaatgctgtgatttttggccctgacgatagcccgtgggacggaggtacgtttaagctgactctccagttcaatgaagaatatcctaataagccaccaacagttcggtttatttctcggatgtttcaccctaacatttatgctgatggaagcatatgcttagatattctacagaatcagtggagcccaatatatgatgtagctgctatacttacatctatccagtcgctgctgtgtgatcctaacccgaattcgcctgctaactcagaagctgcncgcatgttcagtgagaacaagcgagagtacaaacgcaaagtgcggga

SEQ ID NO: 11397 - DNA, 458 bp, Triticum aestivum
  unsure at all n locations
  Clone ID: LIB31-016-Q1-E1-C4
cctggcggtaccggtcctatattcncgggtcgactacgtcacgggagcgctggaacatggagttgaaggcttttcagccggtcacatcgtgcgtccgagcacttggctttctcaagagaacagcataaatgctgtgtaatgctgtcagtcgtgcgacaggatagaagcccatgtgaccgtggaagctacatcataactctccaattcagtcacctatatccaaatcactgaccatcatttcagatcatctcgccggtgaatcacccgaagatatacaccgaaagcaccatacgctaaaaccacctatcgacacattgcgtcctaacaaataagctagcagctatagctattcctatcaattcgcagccgtataatgccatgggacactccctgtctcagtcaattactcgccgcatgtgtagtgagaacacgcaacattacagccacacattccagca

SEQ ID NO: 11398 - DNA, 443 bp, Triticum aestivum
  Clone ID: LIB31-016-Q1-E1-C5
taccggtacagaattcccgggtcgaccaggctgagaaaatgggacttgactacatggatgttgaaagtctcaagaagatgaacaagaacaagaagcttgttaagaagctagccaagaagtaccatgctttcttggcatcagaggccataatcaagcagatccctcgtctccttggccctggtcttaacaaggcaggcaagtttcccactctggttagtcaccaggaatctcttgaagccaaggtcaacgagacaaaagctacagtcaagttccagctaaagaaggttctttgcatgggtgttgctgtgggcaacttgtcgatggacgagaagcagatccaacaaaacatccaaatgagtgttaacttccttgtgtccctcctgaagaagaattggcagaatgtgaggtgcctgtacgtgaagagcaccatggggaagcgtgta

SEQ ID NO: 11399 - DNA, 368 bp, Triticum aestivum
  Clone ID: LIB31-016-Q1-E1-C8
atagtgagtcgtattaaacaccgcgtctacctactctagtctagataccactgttcggtttgactccaaccgataagacatctctctgctaactctcgagagatctggcgcgtccagtttaactactcctatattatatgcgtgtgcctctagggtctatgcccatgtttttcttttctttttctgattgacctatggccacgtgtgtctgtcaatttgcactcactgataccacatgagcaagaccatccgggcagaatccatctagatatcttctgttagactagttcaagctgccacttctaataggatccaaccctaacctatgcgttcaatgctacgttcaaagctcttcgatactgtcacct

SEQ ID NO: 11400 - DNA, 445 bp, Triticum aestivum
  Clone ID: LIB31-016-Q1-E1-D6
taccggtacagaattcccgggtcgacctgatctccgccatcatcgcaagctctcgttacctgcctcatagcatacagtcgctgaatcaaggtcgagctaaggatgcggggcaggtttctggcttggttccgcacctagttgatggtggtatatccattttgcagtatgctgatgacactatcatctttatggagcatgacttggcgaaagttatctttacggccacagcattgatccgtatgtggtcgctactcacaccgacggaggccagggggcgtttggctactgcgtctacccgatgggagatggtagctcgggttattttcaaccggtttggatggcggtcatgtaataggatacgcatatactgctcctattttatttgccagccggttgtggctctatgtttaggctcgcttgagcaaccttttttcctttccaactt

SEQ ID NO: 11401 - DNA, 450 bp, Triticum aestivum
  Clone ID: LIB31-016-Q1-E1-D7
taccggtccagaattcccgggtcgacctggcattacttcgactggataatgtggtcggagagttccgacctatgatatttgcggaagtacctaatgttactagttttagaggggtggtagtatatgttcatggattttaccctcatgcggggggaacagttgtccgacctgggagatttcctggccacattaatggtgtttaccaactgggtgattttacataccttgacggagacttcacatctgagtctggaacgtctggtggaccagttaccatgggagatagagttattggagtaaatgtgcaaagtgtgggaggatcgagatgcgcggtttcccctctgacactatacatgacatttatgaattggtgtggttttaatggcggagaccatacaattgctgcgatgatacaacgccttgctgcctaatcagttttgcaatgtcaag

SEQ ID NO: 11402 - DNA, 451 bp, Triticum aestivum
  unsure at all n locations
  Clone ID: LIB31-016-Q1-E1-E1
acaggtccgaaactcgcgggtcgacctaccaccaacgtcggtgacgcaggagatggtcacaaccatgatgacatcctctagcactacaatttctttagtgtatggggcgaccttgatacgttcggcgtactagcaggcgatggcgatgtggccggatctgtcattgttagtcgaagattggaaacaaaacacaagaatagtgtccctttcaactactagaatgtggttgctaatcaaaagcaggagaatgtatctctggttcttaccaattcttactcaacatgtggtgaccggtaaccaatggtgtatattaccaccaaagattgggtanagtgcctggaaggtcatgccaaattgcacagtgaatccgtggagcttggtaggcataaatatggtagtaatgttagtcataatcaattcagagatggaagttgcacaaatggacaataac

SEQ ID NO: 11403 - DNA, 435 bp, Triticum aestivum
  Clone ID: LIB31-016-Q1-E1-E3
ccggtcctgatttcgcgggtcgacatcggtgagggagaagatccacagtcgatgcatcccaatcaggggtcctcgcggtatggaccggtcgcctgcctccgcccccttcccgaagtttccgcgctccaccatttcgccatggccggcggcggcatcttcagcagggcgctgagctacgtcgtcaacgagttcctcgtcgagggcctcgccaacaaccgtgccttccataggtttgctgtgaggaccaacatgactttggaggatctctcttctaaagctaaacatgctagggaggagatatcggagcaattcaaggatgctcgtggacccaatgatcgcttcaagcagtgatgcccgctccgagtcatctgttcttgccctggttcgggatgccatccacaagtggccattgtataaaatccgaatctaaattac

SEQ ID NO: 11404 - DNA, 452 bp, Triticum aestivum
  Clone ID: LIB31-016-Q1-E1-E6
ggtaccggtacagaattcccgggtcgaccgacagaagggtgctcttggttggttgatcaccaatggtgcaggtcttgcatcttaccccattgacaccgtccgcagaaggatgatgatgacctccggagaggctgtcaagtacaagagctccttggatgctttccagcagatcctgaagaaggagggtgccaagtccctcttcaagggggctggtgccaacatcctccgtgccattgctggtgctggtgtgctctccggctacgatcagctccagatcctcttcttcggcaagaagtacggctcaggcggtgcctagaggggacgaaatgatgacgaacaagagaagtttgttcccagtcctacccttcgaggatctggtgaacttttatctttttaacgttggcaggcaataattattgtagagggtggattttcccaacattcgtttttgg

SEQ ID NO: 11405 - DNA, 450 bp, Triticum aestivum
  unsure at all n locations
  Clone ID: LIB31-016-Q1-E1-E8
ggtaccggtcatgaattcccgggtcgacattcctcctgccaaggttattgacattcctcctgcaaaggcgctgcaaaaggttgatcctctggtgccatccaaggtgctccgaagagatgctcctccacagagtttgcctgtgttgccgaaggaaacaataaaagttgcttcttcccaccagccagacaggcagctgcagcccgttctgcacaaaccgaaggtgcctgtagtctctcccctcatcaaacagcagcagtcaagcaccttggcgaaagaagagccttgctcctctggcaggaagactgaaaaaataccagaggttaagcagtcaaagtctgatcgtaagaagagccgcaaggctgagaaggaagagaagaaagagaggaaattccgagatctttttgttacctggaatccaccttccttggaggttgangagaccgggaatct

SEQ ID NO: 11406 - DNA, 336 bp, Triticum aestivum
  unsure at all n locations
  Clone ID: LIB31-016-Q1-E1-F1
cctgcacgtaccggtccagaattcncgggtcgacagctctttctttaacattatggcgtagactatttaactttactcgtctgaaattgatagagatatagtcatggagtaataaagggcgaaagtgtatttggatattacaagtagctgcttgtgacaatagctaaatgttgtagggtggtctgtcagtagatgagttcttctatgtactgtacatctgacatccgttacttttaaccttatcctgatagtagcaaagatactcatgaaaaggacagcacatgagtttcagagtaatacaatataccgctggggcttggcccagaatttgatctc

SEQ ID NO: 11407 - DNA, 448 bp, Triticum aestivum
  unsure at all n locations
  Clone ID: LIB31-016-Q1-E1-F2
ggtccagaattcncgggtcgacgactgcaatctttcaggttatacacatgtatacataaacggccgcccaggaggcatcatattcctttcaggcaaaagtataaaaatagccttataaaaatttataaaagcatttcgcttacaatgagattacatatcactcaaacataatattttttgagcactgggtctctatcaaacgagcaccctcaagaacttcttcaaagtagtgctcagcagcccttcgacctatggccaaatcctgcgctgcaacattggtagcatccatctccgcccagtatgctttaacaggggcaaatgtcatccgtgcgccctctatgcacgccaacctcttcatcgcattaatgcgcgacaccacgtcaaggaactgctgcaccaagttaaaatagctattcggttttgacctttccggccatagctgatccac

SEQ ID NO: 11408 - DNA, 453 bp, Triticum aestivum
  Clone ID: LIB31-016-Q1-E1-F5
gtaccggtacagaattcccgggtcgacgagatgacgaagcgcaccaagaaggctggtattgtcggcaaatatggtacccgttatggtgccagtttgcgtaagcagatcaagaagatggaggtgtctcagcactccaagtacttctgtgagttctgtgggaagtttgctgtgaagaggaaagcagttggaatttggggatgcaaggactgtgggaaggtgaaggctggcggtgcttacactatgaacactgccagtgcggtcactgtcaggagcactatccgtcgtttgagggagcagactgaagcataagttgctactagtgttttgtcctagtgaatcatctgggatttcgcagtttagacgatactttggattcagttccattggctgtttagtcaaggattatctttgtacttggtgcgatgatgttctgttatgttattctcccaccct

SEQ ID NO: 11409 - DNA, 450 bp, Triticum aestivum
  unsure at all n locations
  Clone ID: LIB31-016-Q1-E1-F8
ggtaccggtacagaattcccgggtcgactcaagcccccctagtgcgaacaatatcatcaccgtcagcattgtacgttgtcagcttgtatatcctcgtcttcttcatctgagacttccatgtagtcattctcaccctcagatccttcagcttcggcaccatttcgaattgaatcacacagaaaaactgcccttggggaaggctggtccaagtagaagagaactagctgacccttccccaacttgttgtctgcaacaaatttcctccatccactaccatacattgcgctctttgtgggccccttgtgacacttaacggtgtattttcgtttgtttgccttaaacttcagtgtatcccctgtcaagtcgttgaaaccaactctttcgttgaatggcacaacctgttatgtgttgaacacacaananagaacaacaacatgaacaatcatcaaa

SEQ ID NO: 11410 - DNA, 287 bp, Triticum aestivum
  unsure at all n locations
  Clone ID: LIB31-016-Q1-E1-G1
tacaggtcctagattcgcgggtcgacatcgtatttgtggcaaagccaccgttcacaattttcatacatgtcactcatgcatcattgcacatgccggtacaccgccggaggcattcacatagagtcatatcttgttctaagtatcgagttgtaatttttgagttgtaagtaaataaagtgtgatgatcatcattattagagcattgtcccagtgaggaaaggatgatggagactatgattcccccacaagttgggatgagactccggacgaaaaaaacaagngcatgg

SEQ ID NO: 11411 - DNA, 451 bp, Triticum aestivum
  unsure at all n locations
  Clone ID: LIB31-016-Q1-E1-G2
accggtccagtattcacgggtcgacgagggtgggggcgcgccccctgcctcgtggccccccctggtgctccaccgacctcaactccaactccatatgttcacgttcggggagaaaaaaatcggagagaaggattcatcccgttttacgatacggagccgccgccaagccctaatctctctcgggagggctgatctggagtccgttcggggctctggagaggggaatccgtcgccgtcgtcatcatcaaccttcctccatcaccaatttcatgatgctcaccgcggtgcgtgagtaattccatcgtaggcttgctggacggtgatgggttggatgagatttatcatgtaatcgagttagttttgttagggtttgatccctagtatccattatgttctgagattgatgttgctatgactttgctatgcttaatgcttgtcactanggcccgag

SEQ ID NO: 11412 - DNA, 451 bp, Triticum aestivum
  unsure at all n locations
  Clone ID: LIB31-016-Q1-E1-G3
accggtccgagattcncgggtcgacttccaccaaagcgaaatccaccatctcatcgaaagacgggacacctttgcctctatcaagtggtatcagatttccaggttgctcggtgagattttacagtttttttgtagtttagatcgagtctgttcttcatacctacagtccacgaaaaagccacaaaaaaaaaattagggttagttcatcatatccgaaccaatctgagcctttgcataatctttttagggttttgctttgttgaatttgcggttgcatcgtcgtgtctagttgctggtcttagagtctagtcttttagagtttcgagttctggtcataagttgtcacgccgcccggcgcaacatcatcaatcaccctgccatctaacagcaccgctttaccgccaccgcttccaatcggtatcaatataccaccacaactgtcatataccac

SEQ ID NO: 11413 - DNA, 463 bp, Triticum aestivum
  Clone ID: LIB31-016-Q1-E1-G5
cgcgcgcaggtaccggtcagagaattcccgggtcgacgctttgtcgagaacttctccaagatcgccaagccactgaccaatctgctacacaaaggcgttaagtttcattggactgaaaagtgtcaggaaagtttccaggcactcaaggacaagatgacttctgccccagtgcttgccccctgattctcgcaaggacttcgtcatctattgcgacgcttcacgacaaggattaggctgtgtcctaatgcaagaccgcagggtgattgcttatgcctcccgtcaagtgcgtcctcatgaagagaactacccagttcatgacctcgagcttgctgcggttatctttgcactgaagctatggcgccagtaccttctcggtaatcgttgtgaggtcctcaccaatcatcagagtctgaagtacctgtttactcagccagatctaaacctccgtcagcagcgatggatg

SEQ ID NO: 11414 - DNA, 449 bp, Triticum aestivum
  Clone ID: LIB31-016-Q1-E1-G6
gtaccggtacagaattcccgggtcgacatgacaagccaaaaaccttagaatggcaggatgatggaaaccctgtagaggcacctgttgtcaatcgtaggttatgcggtgagattcaacccagactcatttcctgcaggaggaaccagtaattgttgaccatcatgagattttcgatagttgtttagcattggcgacagcctgacagctaagaagacccagattcaaaggagcttatttgatgcaaagagtcctgagtttgtggaaaaggtgatgcgcttatcacaagagcactagtgtaagagtttacccacagaatatgagaagactgggaccgtcaaaccaattgatgggtgtatgagttttgttggaagtgttaccatgcttctgagggtggtagcaccccataccttgtgtggatgaatggattttcaaagagagcctccaaacct

SEQ ID NO: 11415 - DNA, 393 bp, Triticum aestivum
  Clone ID: LIB31-016-Q1-E1-G7
accggtcagagaattcgcgggtcgacgacctcaacgggaccagcaccactgcaaactcaatgatgggatatacactcccttatcaggtccctcaatttcacccaaattgaaataaaaactgcaaactttgcaaattcatgggaaaatggggtgcaattgatggccaatggccttgtacagaccgaagattacagcacccaaaggaaatttatcaatatgtttctccttgcgccacaggagaagggatactttgcgcacagagaatatctccactttggtgaccgaaaaaatgtgcactgtgcacgtgtgagctcacgagacccttttgacaccatggtatcatccacagtctccacacatgctgggtacaatcatcatgaaaatcgtccaatg

SEQ ID NO: 11416 - DNA, 379 bp, Triticum aestivum
  Clone ID: LIB31-016-Q1-E1-G8
gggtcgaccttcaatgctgatgaggacatgactaccttggatatgaccaaaaatattgcatatatgcatatttgtcaggtgatttcgagtgcaaactattcaataatctatttgtgttatccagaggagtaatacttcacacacttttgtgttttgtctaattgcaggtgtatgggacatttgtacaatccacatatgaagataaggaagaaagagatgtttatttgctgtccaaaaagttctctcacgtcacttttggcccaagagaagatagagtccaagtctctcacgttctggattcagattcggactgcacagacatacctgactcaagacgcacacaagtttttcatacggactccgaattgggtgatacttt

SEQ ID NO: 11417 - DNA, 452 bp, Triticum aestivum
  unsure at all n locations
  Clone ID: LIB31-016-Q1-E1-H3
accggtcctaaattcncgggtcgacgagccgcctgtatcagaagctccggagctggttgggctggtgcttaggtcacatgtgttggttcttctgagtgggaggaacttcatgaaggagaaggtgaaaacaagtggtagctttgtgctcagaagatttggtgcgtttgactttgcaaagcctggttccgggaaaggtatgaaaatcgaggacctagatttcaccgaggaagaaatggagatgtatgtggatctccatccaatcacaaacacttcgccgtacacggtggtcgaaacaatgtcgcttgcaaaggctgcagtcctgttcagggcactagggctaagacacctgctggttgtgccaaagaccccagggagatttcctattgttgggattctcacgaggcacgatctgatgccggagcatatccatgggctgttcnccaatctccgca

SEQ ID NO: 11418 - DNA, 452 bp, Triticum aestivum
  Clone ID: LIB31-016-Q1-E1-H5
taccggtacagaattcccgggtcgacggttccttccagccaactgacggcacggctggagcggggatgatcctacgtgaccacctgggggctgtaatgctggcagcgataagagggcttgggaattgtgcggacgccctggaagccgagttggcagcaatccatgaaggaattactctgtctcttaattggactgaactagatatccttgtggagactgacagcgctgatgcggtgcaactaatttcggcagccggaaaagaccgttcaacacacactcacaaagtaatggagatcagatcaatactgtctcaagaaaaaaggattcaaattatgaaaatcaagcggaatgttaatgtacctagtcaaactctcgctcatatgggacgtacacaacaacatactgcttgctggttgcgttctcccccggacgagattgcgagcattgttgtc

SEQ ID NO: 11419 - DNA, 368 bp, Triticum aestivum
  Clone ID: LIB31-016-Q1-E1-H6
taccggtagagaattcccgggtcgacgggagcgggaaagcagatgatcgaggtggtgctcagcgaccgcctgtggaacaaaggtgctcgtcaagtggagcgacgacaacaccagcagcgacatcacgaagctcgtggcggcgcacaccgggaccacggccgacatgatccgcatccagaaatggtacaccatctataaagaccacatcaccctcagcgactaccagatcacaaagggaaggggccccaactcaactacaacaagcgtcataacccccgcaattgcaggtccgtcaccaatcgtgcctgtgatgagcgttggttgcattccagtcccaatgtcatcacagctcgatgtgtgggctgaac

SEQ ID NO: 11420 - DNA, 453 bp, Triticum aestivum
  Clone ID: LIB31-016-Q1-E1-H7
gtaccggtccagaattcccgggtcgacttcctccgccattggcggcgatgtatgcggtcatcgacggatgtgtgaacaccatgtgtcgcacgtccatcctctctttcttctcctatcgacatctactcccgcggggcataccgcttgcactcccggcgaatctacaatgtcatcgacaacgtccaagccaagcccaaacatgcacagtacttcaacaaccacatcgacgccgctcaaggccgacgaggcaagacggctagacgggcgtggctggagcaaaggccacgttttcgacggcgcgtgtaccactccgtacacggactctgccgccgccacacacacacaccaccaccatgcatgaggaacgcgaagcaaagaccgaagatgacgactacgcagcttaatcggatgtgtcccgcggtgctatctgcgggagtaattaaccgggggctt

SEQ ID NO: 11421 - DNA, 445 bp, Triticum aestivum
  Clone ID: LIB31-016-Q1-E1-H8
taccggtacagaattcgcgggtcgactgtgggcagtcatctcaagatcttgatagtgaatttcatgttactttggaactaacagagctgggcatatccataattgaccatatgcctgaggaagttctttacctctcagtccagcaattattacttgcctactcatctggaatgggttctggaatcaataggtttaaagtgcgaatgcactggattcaagtggacaatcaattgccttttgtttcaatgcctgtcctcttttgtcctcagaagacggacaatcaatcagaccatgtgctcaagttctctatgacgatgcagaccaataattctctagatttttgtgtttatccatatattggtgtgcaggttcctgagaattgtgtgttttttgttaacatccatgaaccgattatttggcgcctccacgagatggttcaacacct

SEQ ID NO: 11422 - DNA, 442 bp, Triticum aestivum
  Clone ID: LIB31-018-Q1-E1-A9
ggtccagaattcccgggtcgactgacaaccatagataagagcaaaaatactgaagacagcatagattttagcatacagtgcgattagcacttgacctctttcagcccatgtgcaaagtacaggaaagttggatcagcagctccctccttgtagtaggcgaacaccacgccgccatcatcatgcatgctctcgccaacaaagaactgaaggtccttgagcttgctaagaagatactttgtggcggactcaacattcttcttgaaagcatctaggtcatccccttcaagcttggcagagaggttcttgatgtagcgcttcatgtgagagataaactgcttcttgtcaaaagcaggttgctcctgaagacggaaggtgtcaacaatgtcaaccaccttcacggcctggtcatcaacaccctcatcatcaccaccaccctcagcag

SEQ ID NO: 11423 - DNA, 355 bp, Triticum aestivum
  Clone ID: LIB31-018-Q1-E1-B12
gcgatgccctatatggagtcgtactattcctaagaatggggcagatatctgagccccgtgtcactcatggattactccttcccgtaggaaatggtaatgttgtagagggataaatgggaagagacgattataaatccaggaagtttagaatctaattctaactgttggctcctgagaaatgactccattgacgtggcagtcattttctttaaataagatgggttatatgaagaaacggtaccaaaggaggagaaaactgtattctaaggaggaaaaaattaataggaatctttctgagcttctgggataaagcttacagggtttgaagattagtacatttgtatgtggggagaaa

SEQ ID NO: 11424 - DNA, 397 bp, Triticum aestivum
  Clone ID: LIB31-018-Q1-E1-B9
ccgggccagaagacgacagaagggggatatgaagatggtgctactggcgcgaaaaaagagggaagctgctctagaagcagctttggcagagaaggagcttcttgaagaggagtacaagaagaagtttggtgaggcacagaaaaaagagctttctctagaaaatgatctaccaggcatgtgggttcttgttgctaagttgaagagaggggctttcagcatatctgatttaaacgttgatgatcggtctatcaatctagctgagataactaatgatgcagaggaaaacaaaggtgacacaaatgtagccttagttgagaaacaagtgtcagatgatactgtgaagccattgactgcagaagaatatagaagtccagaatttgaacctcttcctgttcgt

SEQ ID NO: 11425 - DNA, 440 bp, Triticum aestivum
  Clone ID: LIB31-018-Q1-E1-C9
taccggtccagaattcccgggtcgactctgctgggaagtggtctctgagaggaaaagcattgttaacaaggctgttgtcccggccaagagattctcggcattaggaatttgcaagtggttgctctccgtaatcttttggagaagaagctctactaccaggtatacgtttggcttgtcaactacgttccttggcctcctgctgctcctcgacagatccaccacgttgagtccatggcggcgtctgcataggccacagcaatgaccacagcctccgccatcccatagccaaacacatgtaaatgcagaacttcagacgattggttaccactctgttttgcgcgtgcattgcattctttgatgatctgtttcttttcgttttggctgagtacagcgcagtattggcgatgtaagttttggctttcaagctttgagcttgctgt

SEQ ID NO: 11426 - DNA, 413 bp, Triticum aestivum
  Clone ID: LIB31-018-Q1-E1-D12
cacaggtccaggactcgcgggtcgacgaggttggccagtctcatcacggatcatcagactactgagatccccatactcctgtaccaatcggtcgttttccctggccagacgctgcagctgcagacggttgagttcagataccgcatcatgatgcagacactcctactccaggaaggtcacagctttggtatcatctactccagcaggaaagatagtaggatggccgatgttggatgcatggtccatatcgttcagtgcgataagctcgtcgatgaccgcttcttcctgacgtgcgtcggcggtgaccggttccgtgtcctggaggtcgtcagaacaaagccctatgtcatcgcaagagtccaggtactgaaagacagagactcacctgattcaagtaacctggggtgcctgat

SEQ ID NO: 11427 - DNA, 65 bp, Triticum aestivum
  Clone ID: LIB31-018-Q1-E1-E10
tagtgagtcgtattaaacaatacgacggctacatagcgtaagtgttctatagctgagtggttgtg

SEQ ID NO: 11428 - DNA, 313 bp, Triticum aestivum
  Clone ID: LIB31-018-Q1-E1-F12
atagtgagtcgtattagacggcgtgaaaaagatgtacgacatccacgccatgaaggttaagaccctgatcaggcctgatggcaataacaaggactacgtcaagctgacaggagacgaggatgctcctgacgtggccaacaagatcggcatcatataagtcagatggacggtcctgcaataggcgcttgtgtcgtggtttcttatgttattggagttttgtagctgttacttagcagaggggctcagtggctccattgcctaccatctcaccgcgcactttcatgaatttgctgcaatcgaagtgacttgtgtt

SEQ ID NO: 11429 - DNA, 437 bp, Triticum aestivum
  Clone ID: LIB31-018-Q1-E1-G10
ggtccagaattcccgggtcgactccaatgaacatgtgctcctctttaattctcaccatcaaactatccttcccagacttcctacaggtatccatgtaccattcatgcaatctttgcatcatcgttgttagaggaggatgatcaagtttgacgagaggcttcccgtactcgtatctaaagatctctacctctaacatttcaaactgtacaagattgctcaggtaatcaccaagattggtaccgggcaatagccccggctgattagcgacgatatcctagacaccttgagcgggggacacaattgcttcacctgttcatcgagctggggaattgttttcccatttcttcgttctgctaatcttgcatcaatggaagtacttcccgatcgcttcgcatcttcatatgtctttttaatatagcgctcatagttggaattcg

SEQ ID NO: 11430 - DNA, 430 bp, Triticum aestivum
  Clone ID: LIB31-018-Q1-E1-G11
cgcgtgggtcgacacaacaccctatagtgagtcgtattagatttaaagaggtctagatatgatgactcttataatcactcgaggagggattacgaagagcgctattctagagatgagcacagagacaggaggcatcgttgaacgcagaagttatcttaaaatgcatctcatttctatgaagcgaagtgccacgctggtacatcttattgagcaaggacagtaacattggcgccattgaagaaggctcagtcacctagcgcaagatttcggccatatgtttactgctagttgtccagcaacgctgttttgccgctgcggtgaagttttgtttgctcatgtttgtatggactttctcctctcttttgtcagtcttgagtatgtaatgtggaggttatattgttacaccggtggcatcatgttgcccagcagg

SEQ ID NO: 11431 - DNA, 421 bp, Triticum aestivum
  Clone ID: LIB31-018-Q1-E1-H12
cccgggtcgaccggacatgataaaatggatctctgcagaatgcgctccgatgaaggctcgccaagggaggatggtgtgatttggatctgaatcctcgtctttttaataggcagctcattcacacagctaggggggtaaatgtaaaaacaccctggctcttcacattcgctcgacacgtggtaagtggtcattactgggcgtggaaaccaatgagtgcaacattcacaagaggccggacactatttcgacaggtacacggaatttggagaaggacccgccctgcaatgccgaagacaatacttcgcgctggactcatcgtcattgaagcctggttcgggggctactgaggaagtcctggattaaggggtctccggacaaccggattatatccttcggccggactgttagactatgaagatac

SEQ ID NO: 11432 - DNA, 463 bp, Triticum aestivum
  Clone ID: LIB31-019-Q1-E1-A6
taccggatctagaattcgcgggtcgaccagatcaaggacgcccttgagacagcctgccccggtactgtctcctgcgccgatatcctcgccctcgccgcccgtgactctactgtccttgttggtggcccttactgggacgtgccactcggccgcagggactctctgggtgcaagcatccagggatcaaacaatgacatccctgcccccaacaacaccctacccaccatcatcaccaagttcaatcgcctcggtctcaacatcgtcgatgtcgtcgccctctcaggtggccacaccatcggcttgtcccgctgcaccagcttccggcagaggctgtacaaccagtcggacaacggcctggccgacagcacactggatatgtcctacgctgcgcaactaaggcaagggtgcccccgctccggtggcgacaacaatctcttcccactcgacgtcgtcagctcgacca

SEQ ID NO: 11433 - DNA, 357 bp, Triticum aestivum
  unsure at all n locations
  Clone ID: LIB31-019-Q1-E1-A8
taccggactagcattcgcgggtcgacctcaaggccgacaagaagaaaataaaggctgctgtcaagaaaatgtatgacattcaggccaagaaggttaacaccctcatcaggcctgatggcaagaagaaggcgtacgtgaagctgacaccagactacgatgctcttgacgtggccaacaagatcggcatcatataagccagagggagggtcctgcagtaggcgcttgtgtcgtggtttcttatgttattggaattttgtagttgttactaagcaaagggccttagtggctccattgcctaccatatcgctgcacactttcatgaatttgatgcantcgaagtgacttgtgtttatgcta

SEQ ID NO: 11434 - DNA, 360 bp, Triticum aestivum
  Clone ID: LIB31-019-Q1-E1-A9
taccggtccgacgattcccgggtcgacaagatcagtcaaaccgacgactatgcgagggatcacaagatcttcgactgaccccatcaccgtctagatacctcggttcaaggtcatccggcgcacacttcataggcaacgcaattacgtgaggatcgactgcaacatgttcacacccatggtgctgcacggattccacaagcacaaccattggttttgtcgcagcttgccacccatttttaccatgctgtgtatgaaacttggtgatcagtctctcatggagtgtatgtatgggctgcccttttacaaaatatcatatgcatgtttggttgatgactacctgggggatccaagcttaacttg

SEQ ID NO: 11435 - DNA, 449 bp, Triticum aestivum
  Clone ID: LIB31-019-Q1-E1-B10
gggtcgaccgcagcgcagaagcaaaagccccaatcccctccgcctccgccgccgttcttctccgtccgcctgcgctccagccgtgcccttctcgtcgccacttaccgacctcgagctccccagccaccgacaaccggaggcggcgccatgtctcagaacaacccctcccagctcctcccctcagagctgatcgaccggtgcatcggatccaagatttgggtgatcatgaagggagacaaggagctcgtcggcactctctgcgggttcgacgtctacgtcaacatggtcctcgaggacgtcaccgagtatgagtataccgccgagggccggcgcattacgaaacttgatcagatcctcctcaatggcaacaacatagccatcttagttcctggtggttcaccgccagatgctgcatgagctagcaagcacttctggaggatatctgtttg

SEQ ID NO: 11436 - DNA, 435 bp, Triticum aestivum
  unsure at all n locations
  Clone ID: LIB31-019-Q1-E1-B5
ttcgccggccgacgtcacactggaggtccaagcatgggtccatggcgataacagcggaccagcagtcaagatgtggaccgcttgctggctttgcacggatacgacgtccgctggcgactggtagaaggtagaacgcggtttggtgctagacaccgatgacgccttgtgaaatctggtaggggaagccgcactccttttacgcggtgcatcctttcatgcattcataatcacatcacatcctgattatctatgagaaacttccctatgagaacatgatatattgaatgatgaatgtcatactgccagacagatgggggtgtatgaacgaaccacggaacgacatancggcatgccatcactagcgcagactccattaatactgactatgccgatcacacattaatacgtcggtcatagacgtcatagctcttctaa

SEQ ID NO: 11437 - DNA, 259 bp, Triticum aestivum
  Clone ID: LIB31-019-Q1-E1-B6
caccctataatgagtcgtattagcatttctgtacgtgcttcactcatagaaatgtgcaactactttatttgagaaacttatagttgggttgcaatgtacgtattttctagcttgagtttacctcagttgtagttttttttaaatacatgatacttgcacttttatagacatgtgtaactaccatttttagtacaggtgcaactgggttgcgacgtatgtagtttcaagcttgagtatccgtcggttgcgccttttgata

SEQ ID NO: 11438 - DNA, 451 bp, Triticum aestivum
  Clone ID: LIB31-019-Q1-E1-B7
ttcgcgggtcgacgatgatgcatactgcatctcctggtcctaccctttggaaagaatgtctagctcctcggatgtctggacaaactctctctagagaaacagagtttgatgcatccatgaggtcagtatcatgggacaactcatggcaacctggccgtgctgtaagattgcctgatccaagcaaaatccctgaattatgcgctcaggatgacatgaagtatgcctttgagccgcttttcattctggcagagcctggggctgttgattacaatgatacaatggaatcttcaagatttggagttgatgcaagtagcagcagggcttacagctcaatttcaggtggcactgatagtggagcaagcccgctacttgaagggtctgagaatgacagtgctccgagtcatcattgctgttatggctggaccgaagactggcgatggttagtgtgcat

SEQ ID NO: 11439 - DNA, 464 bp, Triticum aestivum
  Clone ID: LIB31-019-Q1-E1-B8
ggtaccggactagaattcgcgggtcgaccgaatttgacatgggaggagtccgttaagagagacctgaaggattggagtatcgacaaagggctagctatggacaggggtgcgtggaagcttcctatccatgtgccagagccatgagttggttgcgagatcttatgggtttcacctctagcctaccccaacttgtttgggactaaaggctttgttgttgttgttgttttttctgggaggactgtactaacatattgaaattttcacagtgtgggcgttcggaggctgaggaattaacgagagagcccttattctgatactgaacatacattggtctccaaaccccagtagaagacaaatactcagcatatcagacagggcatactcttacctttacacactcgaatattgtcaccctgtgcctctgtacggcttgtgcatctactgtaatggccctcataagtatg

SEQ ID NO: 11440 - DNA, 457 bp, Triticum aestivum
  Clone ID: LIB31-019-Q1-E1-C5
taccgatctagcattcgcgggccgacggagaagaaaaagttgaacacgatgcgggagatcaaggtgcagaagctcgtcctcaacatctccgtcggcgagagcggcgatcgcctcactcgagctgccaaggtgttggagcagctgagcgggcagtcgccagttttctccaaggcgaggtacactgtcaggtctttcggcattcgtcgtaatgagaagattgcctgctatgtgacgatcaggggtgagaaggcaatgcagcttctcgagagtgggctgaaggtgaaggagtacgagctcttgaggaggaacttcagtgacactggttgctttgggtttggtattcaggagcacattgatcttggcatgaagtatgacccatcaaccggcatctatggtatggacttcttcgtggttctggagcgagctggataccgcgtctcccgccggcgccgatgca

SEQ ID NO: 11441 - DNA, 464 bp, Triticum aestivum
  Clone ID: LIB31-019-Q1-E1-C8
aggtaccgatctagaattcgcgggtcgacctccgtcacaacatccattctctgttctacaggagaaattacatcagccagtactattgcacccccttcatcatgtcgtccgccgctctcacctggaactacaggagctggtaattgcgtaggcggggtggtggtctccgcacatgcttgttgatgtgtggtagttattggtgtgctctcggccggctccagacgaataagattcttcggccatagcagcacccaacccttgcagcttccaatccgcgacggggtctcgtcgtccgctcccacatgctgtactggaggaggcaaatcctcgtgccccgatttcacactggtcaagctaaccctgaagtacccagcggggatcggctggttgtggaacgtgcgttgagaggggtccattatcatcccctttcccacgtccaccttctggcccttgatcaagtagag

SEQ ID NO: 11442 - DNA, 442 bp, Triticum aestivum
  unsure at all n locations
  Clone ID: LIB31-019-Q1-E1-C9
gggtcgaccttgagcactcatgttcatgctcacggaagcaatgtagaatttttcatggaagtttctctgtaaataattatccccttatatatatccattgtattataaaaataatgtgccaagctttggttttaggatgattagattgcttgcttactatgtgcagaacaaaaacagaaactttggctgtagcgcgtgattttacattttttcctggaaagtcaaatgggtctgaaactttctgcacattacttctgtataaatttttcaaattgtcaaatttatttcataatgtttggagttacagaagtttactaaacctccagattactacagactgtcctgttttagacagattctattttctatgtgttgtttgcttattttgatgaatctatgggtagtatcggggggtttgaaccatggtgaagttggnatacag

SEQ ID NO: 11443 - DNA, 436 bp, Triticum aestivum
  unsure at all n locations
  Clone ID: LIB31-019-Q1-E1-D10
gggtcgacaactatgtcatcagccagggctaccaccatgatcccacttcaatcaaggacaatcatgtgccatgggatccaggtggtttaacatggcatcggcttgaggtcaagccgaattttaaggaaaggggaatgttagcgaccaacctactcttgcttgggctgggccatgggctgcgggttttgggctgcagtgaggcctcgaggaaactactacaagtacacacgaaggctctaagaagaactcggctaggaactggatggcttcggcctcctccgcattctgtctttctcttcctctcgtgttcctcttcttcctgtgttggtaaagcttgaggaatccatggctgtaatctccattgatgaggaatagagagtgtgttgctaacattattactanggaaaatgaagcaacggtgttaaaggatgggctg

SEQ ID NO: 11444 - DNA, 455 bp, Triticum aestivum
  unsure at all n locations
  Clone ID: LIB31-019-Q1-E1-D8
taccgaactagaattcgcgggtcgaccgacagaagggggagtcatacttccagtcaatccctggtctccagatggttgcttgctccactccttacaatgccaagggtttaatgaaggctgccataaggagcgagaaccctgtcgtgctatttgagcacgtccttctgtacaacctgaaggagaaaattccggatgaggagtacactctatgcctggaggaggctgagatggtacggcctggtgagcatgtgaccatcctcacatactcgcgtatgaggtaccatgtgatgcangctgcaaagacgctggtgaacaaagggtacgatcctgaggtgattgacattangtcgttgaagccattcgatctgcacacaatangcaactccatcaagaagacccaccgcgtgctgattgtggaggagtgcatgcncactggcgggattggcgccaatctg

SEQ ID NO: 11445 - DNA, 450 bp, Triticum aestivum
  Clone ID: LIB31-019-Q1-E1-E12
gggtcgacacgacagaatggctcgattggtagtaacccccgtgccgaacatttcacatcataaagttgtggagcctcgctcccattttcatcacataccacaagcacggggtaccaacggtgtgtccggtgccctgtgaaaacagtcatggccgccctacctggcacgaccccgtcccaagagagagcaccaactctcccccgtcactagtaatgcgggctccaagctagtatcggtctaggtactcaataatgccctttcccatataagggtagagtggtcgcgcatgtaaggttggaataacggtcgcaactccgaccaatccgttttgaaaacaacacacacctgccttggcacaccacttcgtcatcaagtggtcacccatctcatcatctccctcgggcataggtggcacccgacggggttttcgaaaagacttttgaaatcaca

SEQ ID NO: 11446 - DNA, 429 bp, Triticum aestivum
  Clone ID: LIB31-019-Q1-E1-E3
gggtcgacgaacctactcaaaatgaagatgttgagctggctgccataaagccagaggcggtggagcatgctggtacagaggccgatccaagtaaagaagcatctatacctcctcaagaggaaaccactgctgtagccttggttacaggaccggaacaaaatgaagaagcagatgcacctactcaagtcgaaccagttgctatagtgccagattccatggagcatgctagtaccgaagttgatcaaagtatagaaacatctgtgcgtctcccagaaaaaacttctgttatacctggtacggaaccagaagagaagaaagtagaggcatcctcccaagaggataatgttgaagcagttgctgcagagccagaacctgctggatcccaggaaaatgcagaagtttctaccaagcctagtcctatggagatag

SEQ ID NO: 11447 - DNA, 472 bp, Triticum aestivum
  Clone ID: LIB31-019-Q1-E1-E8
cgccaggtaccggactagcattcgcgggtcgaccaatggtatgagggctggaggcatactgtatcccatgacgcggtcgccggggttgacggcggtgtggaagtagtcgggccagcgagccaggtacgtcatgtagaaggacatgttgaactgcggcgagcgaatcgacgtatcagaccgggaagaggacggccggacggcgtcgtggagaaacagtagcaacaaagggagcgagagatggatcttttggggatggcttacggtctcggtgaggtggtcgaggttgaccgaggcgaagcggagcagatcgtcgcagcagaaccggcgaatggtcgtcatggtctccctcccgtcctcggcttccggcggcggcggaatctcgtggcggagcggggcgggggcggcgctctatccggatttccgattcgtttgtgcgggtcgggttggaaccaggaagaggcttcctgcgatg

SEQ ID NO: 11448 - DNA, 421 bp, Triticum aestivum
  Clone ID: LIB31-019-Q1-E1-F10
gggtcgacttctcgtggttaccgatgcgcggaactgcatggaaggtttgaagagatcacattccaagctgccgatgaagaggaatctggtttgcatgactcagggggcagctctgatgatggaggcgttcaaaaagagcaacatgtcaaagacaaggaacccatacgcctgaatgggttcccaaagatgggtagaagaggtctttctgatcggctttgcttcagttctttccaggagcggtcgtgcccaaccgagaattatgaaagcgatcatcagtcaaaggggttcgacataaagcatgaagtgaagatggccaagtacaaagcacggaaaatggcacacctgaagagagctattcatccatctctggacttcgacaacaacaccaatggagcaagtagaacgaagcctacactgagca

SEQ ID NO: 11449 - DNA, 443 bp, Triticum aestivum
  Clone ID: LIB31-019-Q1-E1-F2
gggtcgaccaccactggtaatctgatccacaagcttggaggtattgacaagcgtgtgatcgagaggttcgagaaggaagccgccgagatgaacaagaggtctttcaagtacgcctgggtgcttgacaagctgaaggccgagcgtgagaagggtatcaccattgatattgccctgtggaagttcgagaccaccaagtactactgcaccgtcattgatgctcctggtcaccgtgacttcatcaagaacatgattactggtacctcccaggctgactgtgctgtgctcatcattgactccaccactggtggttttgaggctggtatctccaaggatggccagacccgtgagcatgccctccttgctttcactcttggagtgaagcagatgatctgctgctgtaacaagatggacgccaccactcccaagtactcaaaggcccgtta

SEQ ID NO: 11450 - DNA, 444 bp, Triticum aestivum
  Clone ID: LIB31-019-Q1-E1-F5
attcgcgggccgacacttcacttgaacctcaggctcaggggcggcacgatgatcaaggtcaagactctcactgggaaggagatcgaaatcgacattgagcccaccgacacgattgacaggatcaaggagcgcgttgaggagaaagaaggcattcctcctgtgcagcaaaggctgatttacgctggtaagcagcttgcagatgacaagactgccaaggactacaacatcgaaggtggctcggtcctccatcttgtccttgctctgaggggtggttactagttaagctgtaatggaaacacttgcctcctgagagaagtgaccattggtggcatggaacctgtgttggtgttgcaaagagataataacaaactagctttgcttagtgggaggggctgtcttccatgttatctgcctatatgatttgacaaaactagtcgcaactcc

SEQ ID NO: 11451 - DNA, 438 bp, Triticum aestivum
  Clone ID: LIB31-019-Q1-E1-F7
cgctactccctatagtgagtcgtattattttttgagattttaaattacattaatttttatgcgtggagaatttgttggatcttatattgatatacatttatttttaaaatctgtttgaatgtgagtcgaaatttcaggattaaaaacagttcaaacttggtaatattatctttgtgaaagtgtgacaaatgtgctgatcgtgtgcgtcctgagaataataattctaatttttgtgcatgttgatcccgtggcactgatagaacgagcgaatgcattgcttgttttaagtataaatttctattaaagctaattaaatttaagtaaagtgaccactaactcctgttattacagtaccaatacagacccgctcgtgaaccgatgtgtggccgagggtgcatcttctagcctcctctagcctccacgggatactgttcatct

SEQ ID NO: 11452 - DNA, 443 bp, Triticum aestivum
  Clone ID: LIB31-019-Q1-E1-G10
gggtcgacttccatcaaagcgatattcatcatctcatcgaaagacgggacacctttgcctctatcaagtggtatcagatttccaggttgctcggtgagattttacagtttttcgtagtttagatcgagtctgttcttcatacctacagtccacgaaaaagccacaaaaaaaattagggttagttcatcatatccgaaccaatctgagcctttgcataatctttttagggtttttgctttgttgaatttgcggttgcatcgtcgtgtcaagttgctggtcttagagtctagtcttttagagtttcgagttctggtcataagttgtcacgccgccgccgcaccatcatcatcgccttgccatctaccaccattgcttatccgccaccgctttgaatccgtatccatataccaccaccgctgccatataccaccgccatatatcca

SEQ ID NO: 11453 - DNA, 455 bp, Triticum aestivum
  unsure at all n locations
  Clone ID: LIB31-019-Q1-E1-G2
cccgggtcgacgctgaaccaaaccgcggcggccatggccagggcggacgtgtggaagaaagacaaggcccacaggaacaggcacccggactatgagttcttcctgtcccgacagcaacggtagacgaccccaagctttttgcacacaccatgtttcagaacactgacgggggccacttcccctgtaaccagaaccatccggactgagcggcgccgtccgcctgtgttacccctgtatatatttgagatagaggtacatgtggaggtgctgctcaattgaaagtgaaaccagaccagaaaatgtttagctcactgcttacttactagttggggttgatatcatangtgcaacccctttttaaatctaattagcttgctcacccatgtggtgtgtgtacatatatgcctgtaactcaactcggcactgtatctatctaactctgtanctgcataata

SEQ ID NO: 11454 - DNA, 456 bp, Triticum aestivum
  unsure at all n locations
  Clone ID: LIB31-019-Q1-E1-G7
taccggactagaattcgcgggtcgacaagccgggcaaaatgtgttgctacttctacaatatcaaagatgatgagattctggtcttgctcgtcgaggacccaatcacagggctttctgtcgctgccgcaatgcattaggaaaagttcaagtttcctattagatttagttctattggaaaagggctgccctcaccgcgcttatccccatcgccggagggccgacgtgcaggggttgggccacagccgacacttccgttcgtgccctaccactgctcaatcttctcgcctaacccccttcctccccgatctgctactgatgtaccccaactaccactggagcttcggggagcactcctctgtccaagttgagcattgggcgccgtccgagtagagcactgcaccccgtccaagtcnccatctaatgttgaacgttcaattttgtcatgttgaataatat

SEQ ID NO: 11455 - DNA, 448 bp, Triticum aestivum
  Clone ID: LIB31-019-Q1-E1-H1
gggtcgacacggttcacaatgtaaatgcatacaaggataccttccgtgggcatgtgtgtgattgccctattgtcaaaggtgtaaaattcgtgagggatggatataccaactgtgaaacctcatgtgttggtaggtgtgagatcaacagtggaagatgcgggaaagaaactacgcatgggaggacactatctgcctgcacgcattaacaatctgcatgttgcaaacgtccacatggttccacgggcgatggtgtgaaaagctgtgaagatactgacgaatgcaaagcgaaatcagcctgtcagtgcagtggctgcagttgcgatactacatgtggaatctataaatgcagctgtggtggtaacaacatgttatacatgagacagcaggacacgtgcatcatcattcacactgcctcctcagtcggctggagcctcatgtgggttatttt

SEQ ID NO: 11456 - DNA, 390 bp, Triticum aestivum
  Clone ID: LIB31-019-Q1-E1-H5
ctcgcgggtcgacgctacaccctatagtgagtcgtaatacagcattacagctctgaatatggattggtggcatgtggctgcggcagcctcatttacccggcaggcgtcctgtctgaagactgcgccggtccggtgggtgactcagacctgggatgtgtcctggatgggacctcaggttttaggagtcaagtttggttgcaaggtctgtgtggtatgatgctcagatattatcaattggataacagttacgacagatgtcagccaacactgtgacatgagacatactgttgtattactttgtactgtcgtgtgttcacagttaatcaactggcagcatgcatcgtccagccggcggtcgtcttcctttcgaaggctgtttagtcaaggatt

SEQ ID NO: 11457 - DNA, 465 bp, Triticum aestivum
  Clone ID: LIB31-019-Q1-E1-H7
taccggactagaattcgcgggtcgaccgtttcctgaactccaaagatttccatcgtccaaatatgataaagggttcagtcaaattgccaataaggttcacgagatgggcttgaaattcggcatccatttaatggaaggaataagtacacaggctgttaatgcgaacacacccatcttggatattgagacgggaaaaccctatgtagagaatggtcggcaatgggcagctcgtgacattggcctgacccataaaacatgtgcatggatgccacatggatttatgagtgtaaatacggatattggagctggacgggccttcttaagatctctttaccgacagtatgcggattggggtgttgattttgtgaaggttgattgtatcttcggtactgattatagcccggaagaagtaataactgtttcacagctcctgcgagagcttgaccgcccaatagtactatccat

SEQ ID NO: 11458 - DNA, 440 bp, Triticum aestivum
  Clone ID: LIB31-020-Q1-E1-A1
tacggtccggaattcccgggtcgaccaaaaggcaatcgtttagataagcatgaatatgctgagctaataaagaggggatctaccgcagaggatttgggagccggccatgctgaagcagcacaagtgcaaggattaggtttatacaaggctcctcacaacgaggaagaaccaagctctcttagtcctgaccctcctggaacggagcctgagcagattgactttgcacctgcaacgaagcaggaagattctgaagatgataggaaggggaaaaggcggcgcgaagagaggagaggggacagagaaaaagagcggaggcgtgaaaagcactatgagggaaaagagaggaagcgagacaagtatgagagtagacacgactcggaggacagggagaagcgccaccgcaaggataagcagaagaggaggcatgattctgattaacg

SEQ ID NO: 11459 - DNA, 323 bp, Triticum aestivum
  Clone ID: LIB31-020-Q1-E1-A10
tagccgtccgaaattcttgggtcgacatatcgtaccctatggtgagttcagctatagtccatgattgggaacatcaatttcacgccagttctgaggagggcaaatatagctgattcgatgtttccgatctaggtcatattacactcgtattagaggacagtaactatgacgtgtgtcatgtctcagtgcgtatgcacgatgggcatgtggatctcactgtctatgggacatatttgtgctgatactcgtgagtatcagttcacagatcatggttaaataatttccgaaacacttgctgtgaaactgggttcaatttcccgccg

SEQ ID NO: 11460 - DNA, 468 bp, Triticum aestivum
  Clone ID: LIB31-020-Q1-E1-A2
cgcctgcctgtaccggtccgtagattcccgagtcgactgcgtccacgcaaaacattgttcccttcccccagctgcgggaccaagccggttatgtgaccagctgtgtggccaccgtcgttctatgcttgtgaagagagcaacccaagtaaacaggcttgtaacttaggctcttgctaatgtatatatagtggttttctttttctctccatatcaatcattttatattgcgtacgtgtcattgaagagtgaaatgatggttgcttctcccgactaacttactgtgtgatttgactgctcctttagtggcccctacacgtactccccctacgtgtatgcaacagtcacacgtacacatagacgaaaaaaaacgcacgcgacgccctaatgcatgcatgtccgagcacactaggaacacacacggtcacgctcaagtgctcaacctacacgtgcatgcacacacatactcat

SEQ ID NO: 11461 - DNA, 468 bp, Triticum aestivum
  Clone ID: LIB31-020-Q1-E1-A3
gtaccggtccgaaattcccgagtcgacaaatcaagggaagaaaagtctggaggactttgcaaccttcctggaggtgaaaatgaggactccattggccatcagaagtggctgagctaggacaaactgaagatcacgaatgcagaacaagtgaaccatgactccccctactccttgcaagatggttgcaggaagtgtggtggtcagcccggcctcggtgctggaccccaagtgatctccgcagccttcaacagctatgccgatgaagttcaggagggatttctgtgagctcgacatgtttggcccctgaagctatccagctcccccttagccccagttttgttaaggatgaaaaagatctataataaactataattcccttagtttctcctcctcttagttgctgcttgatagctctatgagcatctagttggaaaaattgcagtttatttttgcacctttaccctcatt

SEQ ID NO: 11462 - DNA, 456 bp, Triticum aestivum
  Clone ID: LIB31-020-Q1-E1-A4
cgcctgcctgtaccggtcctaaattcccgagtcgacatgtacgatgatctgctgaacgtggtcaccgacgacgacgaggatgccgagtttgatgacatggaggattatatcgacgacgcggactgggacgccgacatgtatgatgatgtgctcgatgtctgaaggagctgtgactaggaccgggtcgggttctcacgtggaaggaaggacgggaacttggtgctgaaacaatgtggtccttacctgtgtttagattcttgaagctgggttctcttacgtttgttaactagtctgctactctcttgctgtgaaactgggttcgctttctctccgcgactgtaattttatgccgcacctgtgatttggtcatgcaataaaaccctgtaaattaagtatcaaaaaaaaaaacgggagaaaaaaaaaaaaagcggccgctctagaggattcaagcttacg

SEQ ID NO: 11463 - DNA, 458 bp, Triticum aestivum
  Clone ID: LIB31-020-Q1-E1-A6
ggtcctaaattcccgggtcgaccctgtacgggttcatggagcagaaagtgagcagcaacccgagggaggccttcgtcaactaccgcgacctggacatcgggcagaacgtggttggcgacaacggcgtgccgacgtacgagagcgggaggatttggggggagaagtacttcatggggaacttccaccggctggcgacggtgaagggccaggtggatcccgacgactacttcaggaacgagcagagcatcccaccgttcctacccgtctaggctgcaacgagtgagtgaacttctcgaaagaaaaaaaatgaagtggtaacgagtgaaggctgaagagtgaagagtgcggattgacgtgtacgccagccaacatgcatgcatgggtgtcacattgtgtttgtcttgaataaggaataaagattgggactgattacatgtcagtggatgaagtagattttg

SEQ ID NO: 11464 - DNA, 393 bp, Triticum aestivum
  Clone ID: LIB31-020-Q1-E1-B10
ttcacgggtcgacgaacgtgaacctggggggggtggacacctcagacgtcatcgcggaatgcctcttaccaccgtgcgcaactcatcactcgtgcaatgccgagagagccatatcgtgactggtgtagttcctcaaggtgttccatgtgctccaatgagcaatttgcgacagttagttcaccgatgccatgcacgccatacggcgcagctaggattccatcgtgatggctgaagacagatgtgacaccccaagctgacctccggcattgcttccatcctggactcagcactgtctatcgccaactctcgcttctatctcaagttctacgattcataccgctcagactttggatgtgatggatccaccttttatacgcatcatatggcatggag

SEQ ID NO: 11465 - DNA, 456 bp, Triticum aestivum
  Clone ID: LIB31-020-Q1-E1-B4
cgcctgcctgtaccggtccgaaattcccgggtcgactacttcacaaccgaacatccgcatgacaacaggccgcgctctttctcggtgtacactccgagcagaactgcggtcgtgtatgcccttacagagtaagaaccagcagctgcttgttacaaggcaaagagagaactccagagagctcgtggatcgtgagcgaagcgacgggcaacggcgcgaggctgctctaagcgccatgactgggaggggatcgtgcctcttccccagatgccaggaggagcagatggataggtagcttgttggtgagcgctcgaaagaaaatggacgggcctgggtgtttgtcgtgctgcactaccctcctcatatcttgcacatttccggttgtttttgtacatataactaataattgcccgtgcgctcaacatgaacatataaatattctaataataggttatccct

SEQ ID NO: 11466 - DNA, 460 bp, Triticum aestivum
  Clone ID: LIB31-020-Q1-E1-B7
ggtcctaaattcccgggtcgactggaaggcgacctcttctaagggtgtccttgggtaaggtacttagatcaggtccatgaccctaccctaggtacgtgaccccatcacctctcacaaaaggaaaaaaacaaaaaaacgcatttttttcgtttctgagaggcacgaccgtgactctcgcgaaaaggaaaaaacagaaaacccattttttccgtttccgagaggcacgaccgtgactctcgcgaaacaaaaaccgtgcctcttgcagaagtaaaaccgtgactctcgcgaaaagaaaaaaataaaacgcatttttcacgcatttttttaccaaccatcaaaaaaatcgaaaaaaaaccgtttaaaaagtcaaaaacgcgtgtgaaaaaataaaataaaaacaaaatctggagggagcgtccagagcgtgacacgtggcgaatagctaagagcgcgccaagtg

SEQ ID NO: 11467 - DNA, 476 bp, Triticum aestivum
  Clone ID: LIB31-020-Q1-E1-C1
cgccggcctgtaccggtccgaaattcccggatcgacgggaactttgggagccggagacactggtcgaacatataaagtttgatcatggttatacctcgaagagtccagcaattgtcaatctacttgagatcatgacagaatttactccggagcaacaacatgcattctgccagtttgtgactggtgctcctcggcttccacctggtggcttagcctccctaaatcctaagctgactatcgttaggaagcactcctcgactgcggcgaatacttcaaatgcagctggagcagcagagtctgcagatgatgatctgcctagtgtcatgacttgtgccaactatcttaaacttccgccatactcgacaaaggaggttatgcacaagaagctgctttatgctatcaacgaaggccaggggtcgtttgatctttcatagtgggttcaaaactaacatacagatggttggtgcacaatgtaa

SEQ ID NO: 11468 - DNA, 384 bp, Triticum aestivum
  Clone ID: LIB31-020-Q1-E1-C11
tagccgtccgaaattctcgggtccacagccctcctggcactgtcagtgaatggcgacctccaacggatccactacaagtggctggcgaacgacgcggcaatgtccacgtctcagaacaacgagctggagtcggtccggctgcacgtgtacagcttctcgggggtgttcctcatctgcggcgtggcgtgcctcgtcgcgctcggcatacacaccgggatcctctttcacaagtactgcgagcaacggcggcagatgtccgccgacggcagctcccgctctagccgcagcagtttccgagcgttcctgtcggttgccgaccgaacggagattgggacccacatatcctgcatcgacaaggcacgaggagatcactccattagcgcg

SEQ ID NO: 11469 - DNA, 476 bp, Triticum aestivum
  Clone ID: LIB31-020-Q1-E1-C2
cgcctgccatgtacggtccgaaattcccgagtcgactagcttcttcgagtagactagcttattgagttgagcggtggagcgactagtcctcgactagtccagactagtctaggtttttgagtcgatcgactcaatttgggagggacaagttttttttagggaaatttgggaaagactagcaaaaaggcccgtgcgttgcaacgggagaaaataaatgacaccccaatccaatatgcatagcgatgggaatgtgtgtcgaggaataacatgaaggagaattgtgatttcagctagccaacctttgcaaaacggcttagaaatgaatgcattcttcaatttgtcgattaagttaaagatataagcatctcctataagatttaaaaaaaaatcaagcataagaataaaaatacatatagaacattaaaaaataaaatcaaaactgaaacataatttcttctgccaaaggaagatgacat

SEQ ID NO: 11470 - DNA, 473 bp, Triticum aestivum
  Clone ID: LIB31-020-Q1-E1-C3
cgcctggctgtaccggtccgagattcccgggtccactgggggcggagtgtacctgggtacaaacggctctagggtggacaacaccatcgtagaggcgagtgggcgtgtcggtgttggtcacaaacgtctgccgatgcctctgtggtggccgaagggcgtacaacagcggcggcagaggtgaaggctgcagatgaaaagtatgggaaaaaagggctaagtggaaggaaatgggaccgtgaggggggattgggtgggccggggtgtcgaagtcttacgtgtctgctgtccgaactcccgcaaagctcccctcactttgtcttcaatttgcgggagatagtgcgtaccgcccgacgaagcgatataggcccgtgttggataacttccgcggcctttacagtgcggccaggacggcttgaaggtcggcgtaggagatttcgttcgaacttactccctccgtcccataatataagtgg

SEQ ID NO: 11471 - DNA, 477 bp, Triticum aestivum
  Clone ID: LIB31-020-Q1-E1-C4
cgcctggcatgtaccggtccgaaaattcccgagtcgacagcgggtggtagatctggtgatagctcccctaataagctcgaatctttccctgatctggaggatctccgtcgccttgttccatttgttcgtcgctgtcgtggagatggggacagaaagtggaagaggtggagcgcaagtttgtttcgattgggtttgtgcatattctcatcggtgcttggagtggagctacggcgcccactggagctgccggtctccgacgcctccccggtgacctttctggccgaagggcggcctggtgaagccgcttcgtttcttcctcctggcttgatgccatttgagaggcagctgttcaacttcaacatggagtcctcttcttccatctttgtccggagatggagtagtggcggtcctgtgatcccaagtggtcacgtccccggtgatggccggactggatctacgctgggagtgagtattgga

SEQ ID NO: 11472 - DNA, 469 bp, Triticum aestivum
  Clone ID: LIB31-020-Q1-E1-C6
cgcctgcaggaaccggtcctaaactcccgggtcgacctcctcctcctcctccatggggacgggggccgcgccggcgtagaggctcttcatggcctccttgtcctcatcgttgccggattcggccatggcgtcatagccgccggccgccgggaagccggccatggcgtgtggagaggagaggaggtgggaggaggccgtggtggaggggatctggatcggggcctcggtggattttttttgagataaacgggggtgggttgacaatggagtgggacattgatggcatgggagtatactagtagcgcggctgcctctcctgcgctacagctatccacatagtagtagcgcgggtttcccgcgctactactatggtctgttcgcgggtcatggttggagatatttactagtagaatgttttttgtaccacacgctaccagtaaatattactagtagcgggtgtcaacatagc

SEQ ID NO: 11473 - DNA, 452 bp, Triticum aestivum
  Clone ID: LIB31-020-Q1-E1-C7
ggtcctaaattcccgggtcgacggtggtgtgatgccatcgtcgtcatgaagttatcctcggtggtgtgatgccgtccccaagatgagtcgctgtgacgccggcggcaagacatacatgaccaggtgcgttgccggtgcaagtggagatccatgccgcggtgacaggcgctgtgacggcgtcatccacagcgagatgccctgtgtggtcttggtgctgcgaaggcaaagttcatggcaagaggtttgcaggtgatctgcatcaagattagaggagttgacatgacaagattagggaggtgaatgttaggattaatcttgtctagccgagctgagagagtcagttagtttgttagctgcgtgagggtcgtgtgcctagagtgattctaggaggaagaagtggtcaagataagattagatgggtgcatgtgaagtggcgtgagtgggtcagtttg

SEQ ID NO: 11474 - DNA, 472 bp, Triticum aestivum
  unsure at all n locations
  Clone ID: LIB31-020-Q1-E1-C8
cgcctgcaggaaccggtcctaaattcccgggtcgacaatgaaggaaggttatgggcaccgccaaaatccctcaggacgttctggcagcaccgcatcatcctcacaagtggcagtcggtggtagatctgtctgactacaccatcatgcactgcctcttgcttcgccgcccttgctgtattgtaggaccatagtgcaccacccgcgcgtccgagcggagaaccacctaacggatatggagatggttgccgccggtgaacctcagatcacgggatcgtagctccgacataacctgatctttgacaagtatgtcgtcggagtcacaacacgcaccagggaggtactccagggcaacactactacacgtgtgcaccatatcgagtcncctccctcttccagcgcacgggaatcccatcgtgtgagcgcggcggacgaccttccgctccgtctcgtcggcacgcgagcatcccgctga

SEQ ID NO: 11475 - DNA, 471 bp, Triticum aestivum
  Clone ID: LIB31-020-Q1-E1-C9
gccgtccgaaattctcgggtcgactccaccaaatcgatagttatcatctcatcgaaagatcgggacaccctcgcctctatcaagaggtatcagttttcaggttgctcggtgagaatttccagtttcccctagattagatttattttcttacctattgtccaagaaaaagccacaaaaaagttagatctattcatccttttgtccaagccagtctgagcctttgcaattttctattcattgtttgcattattgaattatcggttgcatcgtcgtgtcgagttgctggtcttagggtctagttcgtttagagtttcgagttctgttcacattagtcacgtcgccgctgcatcgttatcccttctgctgtccaccacaccatccatcaaattccaccatgtgctacccatagttcattggcacaatcataggtgaggtcgttcacatcttcgcctgattcaatctgcatcttat

SEQ ID NO: 11476 - DNA, 464 bp, Triticum aestivum
  Clone ID: LIB31-020-Q1-E1-D1
cgcctgcatgtaccggtccgaaattcccggatcgactccagtgagatgcctcatccactcttggccggcatgaatgcagctcgggccaaaatgaatgcatgacaaccgattcgtgcaggagagggcgcgggcccgtgagaagttttcgggttgctcttgggtgtccaatgcttatgtggtagtggtctagacgcccgaaagcccccttgatttgcgttcggtttatggaaaaacggacaaccggaccgctcggtccacgattgcggacgatttaagggttcacgttgaagatgccctaagcatcgatctattagttgtactcatgaacctttgttcaaaacatacatatgagaaggacttgcaaagaaaaaacataaaacggtcaattggacaatgaacatcgctttttaaggccgtctacaacgctggccacttgaccagccgcttatggagagaaattcaat

SEQ ID NO: 11477 - DNA, 470 bp, Triticum aestivum
  unsure at all n locations
  Clone ID: LIB31-020-Q1-E1-D3
cgcctgcatgtaccggtccgaanattccggatcgaccccctcgatggcaccaccaatttcgttcatggctttccttttgtgtgcgtctcgattggcctcaccattgggaagattcccaccgttgcagttgtgtacaaccccatcatgaatgagcttttcacagctgttcgtggaaaaggtgcttttctcaatggttctccaattaaaacatcgcctcaaaatgagttggtgaaggctcttatggtgacagaggtagggaccaaaagagacaagtccactttggatgatacaaccaacagaattaataagttactattcaagattagatctatacgtatgtgtggctctttggctctaaacatgtgtggagttgcttgtggtaggctagatttgtgttatgagatcggttttggtggcccctgggatgtggctgctggagctttgattctaaaggaagctgggggttttgt

SEQ ID NO: 11478 - DNA, 471 bp, Triticum aestivum
  Clone ID: LIB31-020-Q1-E1-D4
cgccggcctgtaccggtccgtagattcccgagtcgacttccaccaaagcgaaatccaccatctcatcgaaagacgggacacctttgcctctatcaagtggtatcagatttccaggttgctcggtgagattttacagtttttcgtagtttagatcgagtctgttcttcatacctattgtccacgaaaaagccaaaaaaaaattagggttagttcatcccatccgaaccaatctgagccttgcataatcttttctgtatttgcttcgttgaatttgcggttgcatcgtcgtgttcagttgctggtcttagcgtctagtcttttagagtttcgagttctgttcacaagttgtcacgccatcgccgcaccatcatcatcgcccctgccatctaccaccaccaatccgagttccttgcttattaggtttgttttcgggattaatctagattccgattcgtatttccttgccggagt

SEQ ID NO: 11479 - DNA, 451 bp, Triticum aestivum
  Clone ID: LIB31-020-Q1-E1-D6
ggtcctgaattcccgggtcgacggacttggcgcaataaccattgcaccgcaatctctttgatgtttatatccgaaaacaacgatatttaagccttgcattagtcccaatataaattatttgacaaaagaaaacaaaaatttaaaaacaaagcataaagtttaaaaaagttcattgattttgaaaggaaagttcacaattgttttgttaaatgttactaaaaacaaaacaatcatcattcctagaaaaatatgaaaaaaaatcatggatttggaaaaagttcatcgatgttgataaaaaaatttacgaatttgaaaaaggttccccggattttaaagaaaaaccacaaatttgaaaaaggttcaccgattttgatacaaaagttcataaattttaaatagtttgtagagttgaaaaaatggttcacggattttcaacaaagattatgaattc

SEQ ID NO: 11480 - DNA, 456 bp, Triticum aestivum
  Clone ID: LIB31-020-Q1-E1-D8
ggtcctaaattcccgggtcgacaggatggcttaactgtgatcccggttctatgtttaagccagagcattactttttgggggattgggtgccacaatggtttccatggaaagaagttttccttttacccgtgcagtggcatgctttagcccttggtttgtttgcatcgataatagcaccatttggaggatttttcgcaagtggcttcaagagggcttttaaaataaaggattttggcgacagtatacctggacatggtggaattactgaccgaatggattgtcaaatggtcatggcagtctttgcatacatatatcaccaatcctttatctcgccccacaatttctctgttgacacaatcttggatcagattgtaagaaacctaacctatgaggagcagaaatccttataccagcaactaggagagatcttccgtgaaaggcagtttatgcaaagct

SEQ ID NO: 11481 - DNA, 456 bp, Triticum aestivum
  Clone ID: LIB31-020-Q1-E1-E1
cgcctgcatgtaccggtccgtaaattcccggatcgacaatagcgggacgatcgttgggatcaaatgcaaagatggaattgtccttggtgtggagaagctgataacctcaaagatgatacttgccgggtcgaaccggagacttcattctgtgcaccggaactctggcttggctgtggctggattagcagcagacggtaggcagatagtctcaagagcaaagtcagaagcagccaattatgaaaaggtatacggagaacccatgcctgtaaaggaattagctgatcgcgttgctagctatgttcatctgtgtacactctactggtggctcaggccttttggctgtggagttattcttggaggctatgatagggatgggccacagctctacatgatcgaaccttcaggcctctcctataaatattttggtgctgctctgggtaaaggaagacaagctgc

SEQ ID NO: 11482 - DNA, 462 bp, Triticum aestivum
  Clone ID: LIB31-020-Q1-E1-E3
cgcctgcatgtaccggtccgagattcccggatcgacttgctatgatttatattcctgaagacggtcaagagtcccatatcttccattgaatcggtagaagaatctctggccaaatgcaagtttcaaaggtcagccggcgtcgaggtagcccaaagatcttggaaccgagcagggaggacagtgcctaggcgcagccatatggatgcagcccttgggcaagcaatgaacaaatgctgtgtgccctctgaagtggcattacatcgtgggcaagctgtggcggttgcaatgtgcttatcaaagaggttgtccctggtgtttagccgacctctaaacaagagccaagcaaagatcttcagcttgtttggacagcggctgcgccaaataagatccgcatggtcacactcatcttcctcatgcataataatacccttggagcttttgaggaattttttgccatgtatg

SEQ ID NO: 11483 - DNA, 446 bp, Triticum aestivum
  unsure at all n locations
  Clone ID: LIB31-020-Q1-E1-E6
ggtcctaaattcccgggtcgactactcattgatattcacttatatcttttggagtagtttgttgtttgctctagtgcttcacttataccttttagagcatggtggtagttttatttttaagaaatagatgaactcccatgtttcacatagattattttgagagtcattaatagcatggtaattcgcttaatgttaatatacttggtattcaaggtatgtgaaactttcttttgagtgcgttgaatactaagataagtttgatgcttgataattgttttgagatatggaggtgataatattagagtcatgctagttgagtagttgtgaatttaaagaatacttgtgttgaagtttgtgattcncgtagcatgcacgtatggtgaaccgttatgtgatgaagtcggagcatgatttatttattgattgtcttccttatgagtggtggt

SEQ ID NO: 11484 - DNA, 461 bp, Triticum aestivum
  Clone ID: LIB31-020-Q1-E1-E8
cgcctgcaggatacggtcctaaattcccgggtcgaccagggttgcccagcccgatccaacgcctcgtccgacggcgctgccggccggcgatggatatggagaggagctcgggtcttccttgtgtatattagggcagcagtagttttaggttgtcttggcttcatgccgtggtctggcgttatgccgtggggatgcaaaccactggagctctcgagcggcgtctggtggtggcctccgtcgttttctttcttgccaccatggtggtggaaagtggaagacgccggatctggcaagatccccttggataagctcgttctggtgttgtggtgttccctgatctggagggcatccaactgctactgcttgttttctcaggctaccatggtggtggatgagaagcaagatagttgcagaatcctgaagtttataggtcgagttcgagcatatcagcagacgtccct

SEQ ID NO: 11485 - DNA, 474 bp, Triticum aestivum
  unsure at all n locations
  Clone ID: LIB31-020-Q1-E1-F1
cgcctgcatgtacggtccgaaattcccggatcgacaaatggcacacgtaatacaaaaaaatgatagcatgatataattcacatacatgatgattggctaaacagcatgacattgcataattcacatatataatgcctttgcaacaagatagcactgtataattcacatatataatgtcttgcaacaagatggcaatgcataattcacatatatggtaattagacactaaacatgtggcattcacacaaagcatgtctaaactaatcaaatggcatagcaatgcgagacaccatacgcgcgatatgagcaacataaccctgccaagttagagcatacacctagggggggaatangactagtcatctgtctctgaatcctcctctgaggagctatctgtaaccagcgagatatgcgcttcgtcagatagcatagtctgctcagaagaccttttttcactccagaatttgccatcac

SEQ ID NO: 11486 - DNA, 476 bp, Triticum aestivum
  Clone ID: LIB31-020-Q1-E1-F2
cgcctgcctgtaccggcccgaaattcccgagtcgactccgaggagctcactgtggaggagcgcaacctcctctctgttgcatacaggaatgtgattggagcccgccgtgcctcatggcgcatcatctcctccattgagcagaaggaggagagccgtggcaatgaggaccgggtcacgctcatcaaggaataccgtggcaagatcgaaactgagctcagcaagatctgtgatggcatcctcaagctgctcgaaacccaccttgtcccgtcctccactgcccctgagtccaaggtcttctatcttaagatgaagggtgactactacaggtatcttgcggaattcaagagtgggcctgagaggaaggatgctgctgagaataccatggtggcatacaaggctgctcaggatattgctttggctgagctggctccaactcatccgattaggcttgggctggcactaaacttctcggtgtt

SEQ ID NO: 11487 - DNA, 479 bp, Triticum aestivum
  Clone ID: LIB31-020-Q1-E1-F3
cgcctgcatgtaccggtccgagattcccgggtcgacaaatggcatacgtaatgaaaaaaaacatggcatgagataattcacatatatgataactggatgaaaaacatggcattgcataatttacatatctgatatagatagcaaataggaggcattcacacaaagcatgtctaatctaagcagatggcatgtcaatgcaagacaccatatgcatgatatgagcaaaataacctggccaagttagatcatgcaccttggggggatatgactggtcatctgtctctgaatcctcccctgaggagctatctttaaccaacaagaaatctgcatcgacaggtgcactgactgctcagaagaccttgttttcactccagattttcccatgatcgactcaaatggctgatgcaaaggaagagtagatgaatgtataaacattgttgacaaatggaatacattattaaaaaaaaatggcacgatac

SEQ ID NO: 11488 - DNA, 386 bp, Triticum aestivum
  Clone ID: LIB31-020-Q1-E1-F4
cgcctgcctgtaccggtcctaaattcccgagtcgacctcgaagacgacacactggcttgtacaagagtgctaacatgccttgatgttcggtcaaatcatcaaggggatcatgtaatatcaaatggtggccagtctgatgtcagagatcatactggtaacaaccaggtaatgaaaccttggaaacccagtggaattaacaagtcaattactacatagatggggctgatgaggtcagcttcttgaatataactggtttccgtgcctttccattgggtgatatgccaatgctacatgtgctacgttacgcatctcagaaagtttttgtgccacttacagttggtggccgtaacatacacttcacatatcacactggccgataccattca

SEQ ID NO: 11489 - DNA, 459 bp, Triticum aestivum
  Clone ID: LIB31-020-Q1-E1-F5
ggtcctaaattcccgggtcgacgtcgcttacgtcactctccagtcgtgccatgggttggacgtagaagtagaatatgtgaatcatagctagaaatcaactacaaactggcaaaagaagtggaatatttagcaaaaagcaatgctaattagttatttcagatgtgcgattgttgctgaacattaagacaaaagaagtagaataactaaccaatcattaaagttaaagtggaatatttagcaaagtagtgaacccgttgcgcccaatgacgcatagacccgctaaatccaagtccgaactaaaaagaaaacccatgatttagttagtttaattatgggcaagcacatatagtaacaaactgaacactctttataataataataataaagaacgcttgcttgttctgtacaatacgatgtacacacacatttaaatttggcaacacaaagtttcaatgaaaa

SEQ ID NO: 11490 - DNA, 456 bp, Triticum aestivum
  unsure at all n locations
  Clone ID: LIB31-020-Q1-E1-F6
ggtcctaaattcccgggtcgacaaatggaatacgtaatgaaaaaaaagatggcatgagataattcacatatatgatgcctggctacatggcggtgcataatttacatatatgataactagctgaaaaacatggcattgcataattcacatatctgatatagaaagcaaacaggaggcattcacacaaagcatgtctaatctaagcagatggcatggcaatgcaagacacaatatgcatgatatgagcaatataaccctgccaagttagagcatgcacctcgggggggggggggtacgactggtcatctgtctctgaatcctcctctggggagctatttgtaaccagtaagaaatctgcatcgacaggtagcaccgactgctcagaagaccttgttttcactccagattttcccatgactgacttaatggctgatgcacaggaagagtanatgaatg

SEQ ID NO: 11491 - DNA, 469 bp, Triticum aestivum
  Clone ID: LIB31-020-Q1-E1-F7
gcctgcagatacggtcctaaattcccgggtcgaccgccattgtaaccgagtcgctgcaagtcatgtgccggctcatggctgctccgggagagactggcgcccagctgcgcagacaaatttcaagcagcaaggaagtaatccacggcatggaggaaattctcaagtgttgcggatgcggtgaacaagttcgcatattaaccattgagattctcacgcagctacccgtgggcttgggtgaggagtttccgtgtgggaacaaggaaagcagagaaaattttatcaagatgcttccttctatcttcactgatgaggccaaagagcaccccatcagaaaattggctggtgaagcactgctgaagctaagtcaaagcgaaaccaatgctgccatcatcttgaaggcaaatgatcatcttgtccgtgatctccgtaaaatcctactagatgctgcggccaagggcacaaatcgaat

SEQ ID NO: 11492 - DNA, 449 bp, Triticum aestivum
  Clone ID: LIB31-020-Q1-E1-G12
gtcgacgaccactactacattggaagtgcctactactacgtgcaggctgacgacgacgaccaggagtagttaggaggatcccaggcaggaggcctgcgcctctttcgatctgtatcccagtttgtgctagccatcttatggcaacttgtttaacttatgtctgtactcagatattgttgcttctgctgactcgtctatgatcgagcacttgtattcgagccctcgaggcccctggcttgtattatgatgcttgtatgacttattttatttgtagagttgtgttgtgatatcttcccgtgagtccctgatcttgatcgtacacatttgcgtgcatgattagtgtacgattgaatcgggggcgtcacaaatttgttgcttgataattgttttgagatataaaggtaataatgttagggtcatgccagtgggtaattatgaaattgagaaat

SEQ ID NO: 11493 - DNA, 461 bp, Triticum aestivum
  Clone ID: LIB31-020-Q1-E1-G2
cgccggcctgtaccggtccgaaattcccgagtcgactcttttgtcctccgcgttatattacttgtgtgcacgttttcccctgtttccgtttctgttgagagggagtatgccaagtaaaaaattgtcacattatatttcttcttctattttagctatgaagtaatgaacacatgtgtgttgtgccatgcctacaagaaaatagtttcagttaatttctcccgtttgttcctgtgcctttatggccagcaggctaaactcttttgactgataagctcttcactgctaggtacagagtttatagttaactgaaatcggatagcaaagaacgcaggttcagttttgacttatgctatggtttgctgcagtgtggtatccgagccagcgtcaggtgcgccaagctcgccgtccacacgcctcctcttcatctgcatccgcagtgccaaatccctccccatccgagc

SEQ ID NO: 11494 - DNA, 473 bp, Triticum aestivum
  Clone ID: LIB31-020-Q1-E1-G3
cgcctgcatgtaccggtccgagattcccggatccacataactaaaactccaggcggttaaaccaaaatcacacagagcaagggagtaccttgctctgataccaattgaaagtgtgttatatcgactagaggggggtgaataggcgattttcatgaattcttcactaaggaatttgctggtgaggaaattcctacgtgaagaactactctcaacggaataagtactcacaagtaaacataacagaacataagcatagtcatcatgatgaaatgaagacaagcacagagtacagaaaacataaacacaggataacacaagaaagaagatggacaggttgaagaaattgaactggggaaattgagaaagtcttcagtcaaagtcttcaaacggatatgaacaggcacacaacaacagacatgaggaaatgaaagagttgaggaaatagaactagtaagctcggtgaagacaatgat

SEQ ID NO: 11495 - DNA, 445 bp, Triticum aestivum
  Clone ID: LIB31-020-Q1-E1-G8
ggtcctaaactcccgggtcgacgtacccgccgcacaaccgcagcttctacatcggcagccgcatgaagcaggagccaacgtccccctccccgcgcaataatgaggatgttgctttgatttctctatgaccggtggtcattttgttttgtttgatcacacatttgtaaggctaaacttgttacctcatatgttgcgcatgattttgaacgtgatgaactagtatgatgatgaactagtgatgtatatataaatttcatgtattcatatgcaagcacttgtcaatatatgtcctatgaatatatatttttttgcgaaattgcgagcccctggcacggaacagatttcgtaaacccgtcccgcaagacgcgtttataccagatctgctagagatgctctgcctccaaaccggacaagtaggaatttttgtgattaaggattgaatggc

SEQ ID NO: 11496 - DNA, 418 bp, Triticum aestivum
  Clone ID: LIB31-020-Q1-E1-G9
taatgactgggggctcaggagatgacgcagaaacagccgtcgagcgaggcgatcagcagaggctgcagctcccacaactcgcgtttctgttttggcggcgtgcgctcgcgtgtggatggagctcgtacgccaggaagaactggcgtctcgatggagctcgtatgccaggaagaactggcgttcgttcgacctcgtcctcgttcgtgggttgcggagctgtttttttattgactgggggctcaggagatgacgcagaaacagccatcgagcgaggcgatcagcagaggctgcagctcccacagctcgcgtttctgttttggcggcgtgcgctcgcgtgtggatggagctcgtacgccaggaagaactggcgtctcgatggaactcgtacgccaggaaaggctggcgtttgtttggacct

SEQ ID NO: 11497 - DNA, 449 bp, Triticum aestivum
  Clone ID: LIB31-020-Q1-E1-H1
cgcctgcctgtaccggtccgtagattcccgagtccaccagggttgcccggcccgatccaacgcctcgtccgacggcgctgccggccggcgatggatatggagaggagctcgggtcttccttgtgtatattagggcagcagtagttttagtttgtcttggcttcatgccgtggtctggcgttatgccgtggggatgcaaaccactggagctctcgagcggcgtctggtggtggcctccgtcgttttctttcttgccaccatggtggtggaaagtggaagacgccggatctggcaagatccccttgaataagctcgttctggtgttgtggtgttccctgatctggagggcatccaactgctactgcttgttttctcaagctaccatggtggtggatgagaagcgggatagttgcagaatcctgaagtttataggtcgagttcgagcatatc

SEQ ID NO: 11498 - DNA, 465 bp, Triticum aestivum
  Clone ID: LIB31-020-Q1-E1-H3
gtaccggtccgtaaattcccgggtccaccaggtggagatcacatttatggtgtctttgaccaccagttacctgcagcactgaaaaagcttcctttcgataaacatctttcattgcaaaatgttcgaaaagtcatttctgaggctgatggttaccagccccatttgattgctcctgagcaaggttacagaaggcttatagatagttcactcagctactttaggggcccagctgaagcttcagttgatgcggtccatttggtattgaaggagctagtccggagatcgattgcagcaacagaggaattaaagcgtttcccaacgcttcaatcagatatagctgcagcagcaaatgaaagcctagaaagattccgtgaggatggacgaaagacagttattcgtctagttgacatggaggccagttacctaacagtagaattcttcaagaaacttcctactgagccagac

SEQ ID NO: 11499 - DNA, 452 bp, Triticum aestivum
  Clone ID: LIB31-020-Q1-E1-H6
cggtcctgaattcccgggtccacaatgcgtgtgtatgaccactgacgaggtcaactaatatacaactcggtggtggctgaccgaagagagaagagacccagcggacatcgcatacttgagttttctgcctacaacatggcccaaagtcgagaatgcccccaaagactttctatgtcgttttttagcaagacacctttttacttcgcataagtcattactacgtgtatatgtagtgaatcacttcatcattttgaatttttttataagatcaacctgcccgccgttattactcaaaaggtgtgtggaggtactcttacaacgcagatcataagatacaacatgggccgagaataagcctaacacctcgttgaggcccaaccgacgatggctgaacttcactacaacacaccaatgatggcgacggtggaaaacattgccgccacggtagctct

SEQ ID NO: 11500 - DNA, 471 bp, Triticum aestivum
  Clone ID: LIB31-020-Q1-E1-H7
cgcctgcaggatacggtcctaaattcccgggtcgaccatctatcaacaagacctgcgtcgattccacgccagaaatgtgagaggtcgagcatttcaagagggagacttggttcttcgagtggatcagcagaaaccacacaagcttgctcctgcttgggaaggccccttcatcatcaccagagtgctccacaacggagcataccaccttttacaacgtcgagcacaagaaagatgagccacgcgcttggaatgcggagctgctccgccccttttacacttaagttttcaggctgttgagatgtaataagaaataccttctagtttgattattaaagacacagttttttgttgcaatctcataaatgattgttgttccttttttagtctctaaatcccccagtgggtggcttagccgcgaaaccgtttcgcctaagttcgaaaaatcctaccgagtggtgagcaggcctctca

SEQ ID NO: 11501 - DNA, 462 bp, Triticum aestivum
  Clone ID: LIB31-020-Q1-E1-H8
ctgcagatacggtccagaattcccgggtcgactccgaggaactcactgtggaggagcgcaacctgctctctgttgcatacaagaatgtgattggagcccgccgtgcctcatggcgcatcatctcctccattgagcagaaggaggagagccgtggcaacgaggaccgggtcacgctcatcaaggagtaccgtggcaagatcgagactgagcttagcaagatctgtgatggcatcctcaagctgctcgaaacccaccttgtcccgtcttccactgcccctgagtccaaggtcttctatcttaagatgaagggtgactactacagatatcttgccgaattcaagagtgggcctgagaggaaggatgctgctgagaataccatggtggcatacaaggctgctcaggatattgctttggctgagctggctccaactcatccgattaggcttgggctggcactgaact

SEQ ID NO: 11502 - DNA, 380 bp, Triticum aestivum
  Clone ID: LIB31-021-Q1-E2-A11
tgagtcgtatgaaacaaagccagatgcggtggagcatgatggtacagaagccgatccaagtaaagaagcatctatacctcctcaagaggaaaccactgctgtagccttggttacaggaccggaacaaaatgaagaagcagatgcacctactcaagtcaaaccagttgctgttatacctggtacgggaccagaagagaagaaagtagaggcatccacccaagaggataatgctgaagcagttgccgcagagccagaatctgctagagcccaggaaaatgcggaagcttctactcagcctagtcctatggagatagagtcagttcaagaaacagctatgctgggagaagctgaaaccaggcagcaactgccacttccgtctg

SEQ ID NO: 11503 - DNA, 354 bp, Triticum aestivum
  unsure at all n locations
  Clone ID: LIB31-021-Q1-E2-A3
gccgctggggaagagcttcaccatgacgtggaacatgcgcatccaagcatagttcggaaagttgtgcttccatctgcatgggcgttcgtcgttcgattcgtcgtgtgtgtgtgtgtctaatttattagagcctatagagtagttcatctcatcgtgtttgggtcggttctgtaacttgtgtgggggttggttacctaccctccaacaccatttgtgaaggagccggatcccctgacgtacgggcacctgacattggaccactgacgcgtgggtctggatccacacgtcagcgagtgcgccgtacgtcagaggagctgcgtccatttgtgaagctcactcttgcanggaataaaa

SEQ ID NO: 11504 - DNA, 383 bp, Triticum aestivum
  unsure at all n locations
  Clone ID: LIB31-021-Q1-E2-A4
attccaggtcgacacgagcatccggcatcataatcctctggtctcgccaacccagaaacggttcattccagtgtcacctgtgaaccctccagagacgcgagatgttccccgccattggaacaatccgtagacagtgcacctgcccgacatccatccgtgaccaggaacctcctggtgcagcattcccggggccatggaggcatcacgatgggctggcaatngacatgtctccatttagcggtccaaggacctggtcattgtcaacgacacaccgtgtgcattgtgcaccctatgcttgggtccatactgaccggatgacataactctcatgatcaccactcgtagtagtggcctgatcatcatgatcctgaatcgtacagcag

SEQ ID NO: 11505 - DNA, 404 bp, Triticum aestivum
  Clone ID: LIB31-021-Q1-E2-A6
taccggtcctaaattcccgggtcgacctatggcaacgaagaaatgggccttgccgcgatgatgaccgacggtcgagtctaaagttgtgggacggaacatgtcacctactcacgtgttccatgaagcaatcaaggacggatcgcactagattctgcatgtcgggtagtaactgtcaccataaggaaaaacagatctgcgatcgtaggcgaacactgatcaggaccataggaggtctacaaatacgggagggcacgtgttcaaattggttagcatcgaaggagtaaagtgcaagcgtcaataccaatcatcggatgctacatcgctgaccatgtcaatggaatgacagtcggacgaccggtactatacgagaagatcagacaggcaagaaaatcgatcaatgccat

SEQ ID NO: 11506 - DNA, 383 bp, Triticum aestivum
  Clone ID: LIB31-021-Q1-E2-A9
taccggtcctacattcccaggtcgacacatacggccgaaacgtcgatggccatagtcctatttacaacgagaacgaatggtcagcgagtggagacgtgtataatggaggagtcaccggattggcaatttgggcggtaactctcgccggaattcttgccggtcgtgcacgtcttgtgtccaagacaagtgcgttggctcagtaaatcgtatagttgttagcgcatgtataatcatgtttctataaatgtttcagtagggttctcgttcactctaatgttgtaaaactcagacatactttgagtttataagacatctaatgtttgtatatataaaaggcctgatgggaatggggaaaaacctggcgatctagaggatcaaagcct

SEQ ID NO: 11507 - DNA, 445 bp, Triticum aestivum
  unsure at all n locations
  Clone ID: LIB31-021-Q1-E2-B10
tcgaaattccagggtcgacccacacatccagaatgtgggaacagcgacaagccttatggggtttctcatgaacgatgtcacaagatacacaagtaaacgaatctaccactttcacaagactgattttaactggactattgnaatgcagccagcgaagatggaaatagacaccgctgtcatggatgttgatcaccacatcgtcatgctaggtgacaaagtcgacgaattatgcgaccaactgatgtaccagatcaacgacgtcattgggatcgatagctgctctgaccctgatcaaagatctcgtaagctgaggcgccaatcacattggagtgtcaatcacacctgttgcagctgtagctgcaggctttctcgacagtcataaatttgatcacatacatgcaccgcatcatgtccttaagaatatgtaagcacttttttcagacag

SEQ ID NO: 11508 - DNA, 441 bp, Triticum aestivum
  Clone ID: LIB31-021-Q1-E2-B12
tcgaaattccagggtcgaccgtgccgttgcacgaagtaattcacgacctcgacgtcgcttcgctgtacaccgctgagcatagcgtgcaccgctcgacgatgccttctgtcgtgcaaatccagatcgagctcgctaaaccaactgtgaaccaaggtgatgaacacgaagagcttcatcactccggtgaacgagctgaatccaacaatcctgcgactaccaattctactgacgcaccgactgagtacgcgaaagatcatcaccatcagcaacatcaccacacaagctcggagtcgtcgcagacgcctgatcacatcagcatctgattatcaagatccatctgttgcgataacatgcagacttcatctatcgtgcaagcctaagcctgactctagggtacgttgagtgatacacatgtatgggtacagtacatatccaaactgc

SEQ ID NO: 11509 - DNA, 431 bp, Triticum aestivum
  Clone ID: LIB31-021-Q1-E2-B2
acgcctgtccgtaccgctccgagaattccaggtcgacgagccaatgcggaatctttgagcggaagagaactgtcatcaggtggctactggatggtgggctaagatgttgtggcgtcggatcgacattactgttctcacagatccggtgatggtcaaaacaaatggttgttttttcatcaccatgaattaatctctgtgagttgtattgaagcggtaacaactaatatggatcggagggagtaacaattttagatgagtatatactatatgatttttggtagcaacgaatacattcaatcagtttggctagcggaacagcgtaatagattatgtctacgggtcatctaatcttgcacgctgatgtgcggcgcttatgcgaacactgcatcatgggtcgctcacacgtcgccgtttcatgaatttgcccaact

SEQ ID NO: 11510 - DNA, 400 bp, Triticum aestivum
  unsure at all n locations
  Clone ID: LIB31-021-Q1-E2-C4
attcncaggtcgacacacgcgacaggttctacatcacgatcagccaagcccaaaagcagaggcgccgtacataccgtgctcatggacgcatcaatccttacatgtccaacccctgccacattgagctgatcttgtcagagaaggaagagcctgtgaagaaggaggctgacaacgtcgtcgcaccaaggaaagctatctaagctaacggagtggctgcattcgtccaagaatcttagttgtagttcttctcaagtatctttgttggcagtgtttgttgcctccttgatgtttttgttaccaacatggagtaaggatttgttaaggttgatgctatccttgtgatcgcgagtggtctttatatgctaaaacagtttcagatatttgagcattagcccatcag

SEQ ID NO: 11511 - DNA, 424 bp, Triticum aestivum
  Clone ID: LIB31-021-Q1-E2-C6
taccggtcctgaattcccgggtcgacggaagctgcggcggacgctgaactgatggctcgataggcacacgacagcatcatatgatccgcgtaaaatgtgtcatcctatcagacggattgatcacagtcagaatgcccacacctgtgtgtatcgccaccatctctatttgacagataagctagtgtctgtcatgtcgagtagtagtctcctgcactcagtcaaggaggatggatgtatgctctgtccgttgcaatatcaccgcgtgatagcactccgtgatggatgtaatgattgcgcgtcagtcgaactactgtggcttcacttgtcgaagcctgtaccattgtggaaccgctactcaacaggctcaacccctagctacacgtccaggagatgtcaaagatctaccagaatgacctgagcattc

SEQ ID NO: 11512 - DNA, 441 bp, Triticum aestivum
  Clone ID: LIB31-021-Q1-E2-C7
attcccgggtccacacactcatcggcgaaaagcggatctaccacatggcctgcttcaggtgccaccactgcaacggcaccctcaagctctcatattaaaactcagttcgaaggagtgctctactgcacgcctcacattgaccagctcttcaagaggaccgggagcctggacaagagcttcaattgcactccaaaggttgtcaagccagaaaggaatgttgggaatgagaatgctactagagtctccagcgcatttgctggcactagagagaaatgttttggatgcagcaagacagtctatccaattgagagggttactgtgaataacactatgtaccacaagagctgcttcaaatgctgccatggagggtgcaccatcagcccttcgaattacatcccgcacgaaggcaagctcttctgcaaacagcaccaaaaccagctg

SEQ ID NO: 11513 - DNA, 419 bp, Triticum aestivum
  Clone ID: LIB31-021-Q1-E2-C8
tacggtcctaaattcccgggtcgactgatgcgtccgaaaggttacgcgcagctgatctgtacatgagcggtcgcaattctgcgcacatgtgtgagtagcaacatcggccagatgacagcgggtctgtttcaggtgttggacctgtcaaacactaattcacagttgtcaggtaagtaatcgtaaccagatggctcatgtgacgatgatgccaagtgcataaaagagcacttgtctgggggttcgaagctctgcatgctcctagcccatatctgatttgatacaacttaagacatctcctgacctttacagcttcccatgccaatggcgatcatattacactgactgatctgggatgtgtctgacgctacaaccatatgtggcatgcagtaaagttccatttaaccagttggagattcacc

SEQ ID NO: 11514 - DNA, 378 bp, Triticum aestivum
  Clone ID: LIB31-021-Q1-E2-D7
gggtcgacccaaccatccacagagatccaaactcaggtgccatggagacagtcatgggggtattgccccacatgttttgccaaactgctgctgccatggcaagtgcagtgacggactatgatatcatcatgcctcacaacgactcgcttaaatttctggcttatgctcacgatttaatcatgctgcgacacttactcagcatcagtcttccatcaatactacgcattacatcatgatacatggcagtgtttcatcttcatccttaatccatctggcttatcattttcaaaaggatcctgacactcgcgtggctatcctacgcattcaaggttctggccatagattaacatttactgcaccacatcatgttgtaattgc

SEQ ID NO: 11515 - DNA, 386 bp, Triticum aestivum
  Clone ID: LIB31-021-Q1-E2-E10
ggtcgactgacgcgtcttaggcctcgcagatgatctgtattcggggaatttctgcatgtcgtcggatgtattacgtgtctttggtacaagtgtcagcatgagtgtgtatcggactcctaatcaaatcaaagcactcctgagtgtgtcattcgactaaatctaagcgtcttaatcactctatctttcgagcatctggcatgggattcagtgtggagttttagcgttttggacctcctcgcttggcgactcacagtcactggactcataaggtacttgaagaaacagttgcacacgcttggcatcagtccagcatgcctgcaaaaggtaccaatgcaccctgtactacagcattttgtacacagccgtatgtaccccagagacattac

SEQ ID NO: 11516 - DNA, 411 bp, Triticum aestivum
  Clone ID: LIB31-021-Q1-E2-E5
tacggtcctaaattcccgggtccacgcatgcgtcggaacattagttcatcatggctagtgcactggctggcagcacctggccttctatgtcctctattctccacatgccgttcaccttgcgttgccaagggagatcccctgcaatgtcacaacattcttgctgggtcagtgtgatccgatgttaaatggtatatttttccctatcgtgtccttgcacaaactttatgcgattgttatcagttggtcagacgtcatgacagtgcttccttggaacgttattgaagcaactgggacacatttaccggattacttccacatgattatgtctgaatacagattatgacactacgagttgtctgggctcatcgaaaattggcttcctcccgtcaatgtactgcttgctttcatctt

SEQ ID NO: 11517 - DNA, 345 bp, Triticum aestivum
  Clone ID: LIB31-021-Q1-E2-E7
ttcccgggtccacccaaacatctgaagcttctacgacaactagtctgtgaatcggcatatcgtcacttcttgacccatcatctcgtctcagctgttgccagtgtctgacgtgatcatggcagtgcgaattatggtgaaatcaacctaaaccgatcactcgccccttacaggccgggaagacatcttggttggctgtttatcactgtgcggtccctattagtcatcgaatatcgacgtggtagtgtggtatgcatggatgcaatggatcgtacttgtcacaacactcgagacagtatgtcgatgtgtatctacgatagcgtttgactgcagactagtgacgtgttg

SEQ ID NO: 11518 - DNA, 425 bp, Triticum aestivum
  Clone ID: LIB31-021-Q1-E2-F10
caactccctaaggtgagtcgtattaagactttggttatcctaaagactttgagaatgaagaaattggtgtgaccttgaagatttggatattcatgtaaggattatgaagcgtgatgacttttgttttcaaagtttcattttctctttcttgagtcataggaaacaggatactgttaaagggggtcgaggtaatactaatgaaactgatttccaagtgatgctcatctcaaaatcctacacctatgcaatcctttctagtgaagcaattggaaatctcatatcatctcagtcaatttcttcagtgacagagatgaagatcttctggtctctgatgaatttgtcctgactgacgagttaggaattcgccagtgtggattgcctacacagtgaggaacatgatagccctgacgaattctgtgatgccc

SEQ ID NO: 11519 - DNA, 416 bp, Triticum aestivum
  Clone ID: LIB31-021-Q1-E2-F2
caccaggactccgtcatgttcgacaaaggacaacaaattctactattacccagaaatggtggggacagtcatcctcatcttgggcagagccttgggcggcttggacggcgtcacgcgtgggtgcttgggagctttttctgtcggcgctggagatgaggtccgagggcgcttcgacgactgcccaacagggatagtcgccttaccacgttcccgcggcgggtcgtttgtaagcttggatcgccgttccgagcagggagatttgacctcttcctcctcctcttcactggagtcgtcgtcgtcatcaccctctccttcgccgtcagattcccactcttctcccccgtctccactttagcctccactcgcctcgccttcctcggcctgctcctgtgctccatcgggtgtcgagtacatct

SEQ ID NO: 11520 - DNA, 404 bp, Triticum aestivum
  Clone ID: LIB31-021-Q1-E2-F9
ttcccgggtcgacggttgtatgacataccacaaaatgatgatctttggagaatggtttgccgtaatgcatggggtactgagactacgcgagctcttgagactgtgcctgctgcgaaaagattgggctggggtctgatggccaaagaactaagcaccctggaagctgttgcatggaggaaattgacagttggaggtgcagtggagccatctcgatgcaacttcagtgcttgtgctgtacggaatcgtgtcgttctctttggcggggaaagtgttaacatgcaaccgatgaatgacacgtttgtgttggatttgaatgctagcaatccggaatggagacatgtcaatgtaagctcagctcctccaggccgctggggccatacactatcttgcctaaatggatcttg

SEQ ID NO: 11521 - DNA, 465 bp, Triticum aestivum
  Clone ID: LIB31-021-Q1-E2-G5
ggtccgaaactcgcgggtcgaccgtttcctgacctccaaatatttccatcatccaaatatgataaagggttcagtcaaattgccaataaggttcatgagatgggcttgaaattcggcatccatttaatgaaaggaataagtacacaggctgttaatgcgaacacacccatcttggatattgagacgggaaaaccctatgtagagaacggtcggcaatgggcagctcgtgacattggcctgacccataaaacatgtgcatggatgccacatggatttatgagtgtaaatacgaatattggagctggacgggccttcttaagatctctttaccgacagtatgcggattggggtgttgattttgtgaaggttgattgtatcttcggtactgattatagcccggaagaagtaataactatttcgcagctcctgcaagagcttgaccgcccaatagtactgtccatctca

SEQ ID NO: 11522 - DNA, 396 bp, Triticum aestivum
  Clone ID: LIB31-021-Q1-E2-G8
ggtttgcattgaaggaaaagaatgggaagatcgaggcccttaccagtgaggctgacgtgctgcagctcgcagtggctgaagcgcagaagaagaacaagggtggtatctgggcgtgggtgtatgccgccaccaccaccatggtggccgcaatctccctgatctatgctgccaggggccattgaaggagtgcacttttctttttcttttttcggtgttgatcctctatttgcatgctagtatggcactcgaaatggtcaggtcgctatcttagctgcatcacatatgatgaatcggctggtactatgcaatgaaatcaaatttttgcttgcattctggtaacaaaaacaccccggcggaaggcagaatagcggccgctctagaggatccaagcctacg

SEQ ID NO: 11523 - DNA, 448 bp, Triticum aestivum
  Clone ID: LIB31-021-Q1-E2-H7
gggtcgaccctgcttcctcaactgccgtcgcccctgcttcctcaaccgccgtcgcccctgcttcctcaaccgccgtcgcccctgcttccccaaccggcgtcgcccctggtgtgactggagctcaggttggaggtgaacccaaggttgagtgatttagccgatggaagtttcttaaacatcactttttgttgcccctggtgtgactggagctcaggttggaggtgaaccaaggttgagtgatttagccgatggaagtttcttaaacatcactttttgtcgcccctgttgtgactggagctcaggttggaggtgaacccaaaggttgagtgattcagtcgatggaagtttcttaaacagcaacctttggcatttgaccctaagctatgattttttgtcattcggcttgtgatgtatttcctattacctcgttgatatagtttttgatctg

SEQ ID NO: 11524 - DNA, 435 bp, Triticum aestivum
  Clone ID: LIB31-022-Q1-E1-A1
ccggtcctaggattcccgggtcgactgagacctggataaatctcaatcgaacgatttttagctctgcctcccccggcgtcggcgccagcccaccccgtcttcggtggccttagggccatgggagcagatctcagcccttgtcggttggacgactctgtttttagatatgttttcgagttttgttatggtttgtgtcctacacgggaaggtgagacgacggcggctccctgaagatggaatatacgtctccccgtctagtccctgtgccgttgtcgcatctactattgtctgtgggcgtgtggatgtgtgtcttcaacgaatctgtctttgatggatttgctcggatctgttcatcattcgtctatattcttgtgtctttaggttgggtccttctgatctacactcttcatccacgatggtggccgttctggtgca

SEQ ID NO: 11525 - DNA, 425 bp, Triticum aestivum
  Clone ID: LIB31-022-Q1-E1-A10
taccggtctagaattcccgggccgacgaatggcacgagcaaccatcagcgacaatagtagactgggtgacgattgatgggcaaagcgttggtgcctggatcaacctcgtgaagcaactccacatggagatctcaaggcgaacacttgccatgtcttcggcaggtgaagaatagggcagctgcagctgctaccgcgctttatttttattctttggaggctgttgggtctccggccgggtgtatctactcgatagcttttgtgccatatgctgttttgtaattgttatatgtacgcatcctttttggtttgggttgtaattaatttgtttatcatgtagtatatgtttttgtatgttttatcatgtgctaaatatctatttttacgtgctttgctattaaaaaagaagaagaggggaaggaagagag

SEQ ID NO: 11526 - DNA, 431 bp, Triticum aestivum
  Clone ID: LIB31-022-Q1-E1-A6
ccggtctagaattcccgggtcgacactgaggggtacccgcgcgagcttaattgcgagtgatgtggagatgtgttgacctggagagtaaccgagagttgaacacgaggcgtggccgggcattcttagcccttgtcgcaagtcctcgagatggggcgacagggtcacatatttcgtgagtctctgcttgttaccgcgtgttcctaatccactacattctggatatttgatccgaggggcctctggcctgatagcactaaccatcacgtgggcatagtatgggcgttttgcgtcatatacatcagccaaagcttaatcgacctcagcgactgagcggcgcgcgcagggttggactgcgtaagctcctgccttgtttaaggaggtagttaggtctgctcaccggccgcgtatgtaacgtgtacgagttcccgggg

SEQ ID NO: 11527 - DNA, 400 bp, Triticum aestivum
  Clone ID: LIB31-022-Q1-E1-B11
taccggtctagaattcccgggccaacgcgagaagacaacagaaggggtttgtcattgcggaccttttcgcttcgacctctggaccctatagtccggagtgtgtccgaataccctctcggttatgtaagaactggggcatgcatggagacaaggcataggggtcataagtgctttatcagacaagtgcccaactagttatgttatattacatggttagtaagaaacatcttccagagagaatagttccgttaggggttccttttcctgggaggcatgccctaaggtgcatgtccgaactgtcggaaagagcagaaaagcatctgggggcaaataaatgaatacgaaagatcatcttttagttcaccgaccgaatattcccttaagaacgctagctttcggc

SEQ ID NO: 11528 - DNA, 376 bp, Triticum aestivum
  Clone ID: LIB31-022-Q1-E1-B12
ctcgtggtccaacgctacaccctatagtgagtcgtatgagtcgtacaagaaatagggtggctaaactgacaatgcccgtcttcactgccgtcttggtgatggccctgttgatcactgcatcatcttcaggagaagtttcaacgacagaacgtgataaggatgcctccaaagtgacatagggtcacacttctctttaccatcttcagatgcacagccacagcaggatgaggattctgacagattttctggactacgactacggaggagccaactccatacacgatccacacaggaggcccgggaatgggggacattaggcactagataatagctagctctcgcaaccattcaagatagtcccgtgttttggactggt

SEQ ID NO: 11529 - DNA, 429 bp, Triticum aestivum
  Clone ID: LIB31-022-Q1-E1-B5
ctcgtgggccgacacgactccctatagggatgctagtatgatgttgcaagtacttggagagtgccgatatgaaattaagtgctagtgtgcctgacatgagaaagaaggcagaaggaagaggtcttgagaaggaagaggaagattatttcaatgagagtgacgaggaagattcagtaaggcggactaaacatgcacacagtgaacataatgaagaaagcaaggatgatgtagccaatggaagcgaaactggtgacatatcctcaaggcctaaatctggtgggcttgtggactatgccgatgatgatgacgatgatttcaatccgccacccaaggagcctgataggcctgtggatgacgatgacctcttaactatatccacagtgaatcgggaattagttaacacgggggatggaaaacatgcagatgggg

SEQ ID NO: 11530 - DNA, 272 bp, Triticum aestivum
  unsure at all n locations
  Clone ID: LIB31-022-Q1-E1-B6
accggtctagaattcccgggtcgacagtaaaagttaccagaaattgtaacaaaaatgttcggtggttgccaaatattacaagggtaattatggtgcagcaaacacaattttacaaaatacctaaatgacctacactaactttaacatgaaaaggaaaacacataaaaaaaaaaaaaaaaaaaaaaaaaaaagcggccgctctaaaagatccaaacttacgtacacatgcaaacaacgatatancaccacaatagaaacacctaaattcaatt

SEQ ID NO: 11531 - DNA, 76 bp, Triticum aestivum
  Clone ID: LIB31-022-Q1-E1-C1
tactgagtcgtattaaaccttacgtcagcctgcatgctccttcatcactcttcaacactgtcaaccaccttcagct

SEQ ID NO: 11532 - DNA, 428 bp, Triticum aestivum
  Clone ID: LIB31-022-Q1-E1-C11
gtgggtcgacgcgattccctagagtgagtcgtattattccaaggagcttgtaagcaagagagtgagaggtgtcttctccttcttcctcctcttcttcttcatggagagaaacataagaaaaccattagtctcatcatcttatggagctgagtattgtcccataactattgttgcatgatttagcatactataaatgttaatcaggccattaaatttgcattgcatggttccccttaaagaattgcattttttcagttattgcttattgttgttagcaggataaatatgtgtattttataacactgttgcaggactgatgagaatttggttggcttttttcttgcaccggcaacatcatctctacatctgatgtttaggttgtgttagtaatgagtaataagaaagtgtggcaaataatcgctgaacag

SEQ ID NO: 11533 - DNA, 415 bp, Triticum aestivum
  Clone ID: LIB31-022-Q1-E1-C12
gcgtagtccatcacaacaccctatagtgagtcgtattacgcgaaccctggctggtgcattgccaaagccgtggggtatctgattctcggtgctaccatttgtgccgcatttgcagacccgctcgttgatgcagtccacaacgtctcaaacgccacacacatcccgtccttcgttgtcgcgttcatcggcctcccagcagggaaccaattccagcgaggctgtctcggccatcatcttcgccagcatgaagaagcacatgacttgctcccttactttctcggatgtatacggcagtgtgaccatgaacagcacactgtgcctgggcgtgttcttagcgctcatctacttcagggagctgacgtgggacgtctcggcggaagtgctcgtcatcctgcatatctgtgtcaatatgggg

SEQ ID NO: 11534 - DNA, 316 bp, Triticum aestivum
  Clone ID: LIB31-022-Q1-E1-C5
tcgtggtccgtcactactccctatactgagtcgtattaggcttcatgtatcaacgacgtggtgcgggaggccatcgaggtgggcacaatgtatcaaggcgcgccctgatgtgctgtgctccgcgtggggctcacctctggctagtccttggacctcaagatctctgctactccaaactttatcgcctaaagattttgctgcgtttggactccttttggtaatgatatgcaacgaagtttgctcaaaacgtaccactacatctggcactgggcactatatctctaggttagtcacaggtatgttgtaaagttggcta

SEQ ID NO: 11535 - DNA, 414 bp, Triticum aestivum
  Clone ID: LIB31-022-Q1-E1-C6
ctcgcgggccgacagcactccctatactgagtcgtaatatcctgagcaagcggcgaagggactacttcaagaagcttctcaaaggggcagtgctgacaacatcactgtcgtcattgttcgcttcttggacggaacgacgacgtctgctggagatggaccgggcgaggaggttgccaaggaccaaagtgaggaggtcgccaaggaccaatcttcatagttcttgttcctccacggcgttgtatccgctgttgtatctgatgctcaaagtagatgtcatgtggcggcgccctcccgtgctgcgaaaccgaaactgacttggcctgagtttcgtcgttgttccatgctcccggctatcctagatggtaggtaatgtcggaacacagggggatggtggggcagtgttgttaccatatg

SEQ ID NO: 11536 - DNA, 450 bp, Triticum aestivum
  Clone ID: LIB31-022-Q1-E1-C9
ggtaccggtctagaattcccgggccgaccccaaaataaaaaccgtcaaagaacaccttcggcggtctgccgtgcagaagagggaagcaattggcgaagaagtggctcgactgttgacagcagagttcatccgtgaaatctaccactccgagtggttagccaatgtagtcatggttcctaagaaggataattcacttcgtatgtgcatttatttcaagcatatcaatcgggcctgcccgaaagatcacttccctctccctcgcatcgatcagattgttgactcaactgtgggatgtgagcgcttgtctttcttagatgcatattccggataccaccagatccgactgtatggtcccgatgaaataaaaacagccttcctcgccccattcgggtgcttttgctatgtcaccatgccttttggtctgaaaaatgccagagccacattcatgag

SEQ ID NO: 11537 - DNA, 389 bp, Triticum aestivum
  Clone ID: LIB31-022-Q1-E1-D5
taccctatagtgagtcgtattacgtgcgcctcgtcaagcgctgccacaagcccgaccgagaggaattcaccacggtggccagtcagacggccatcgggttcgtcgtcatgggcttcgtcgggttcttcgtcaagctcatcatcatccccatcagaattatcatcgtcaggtccggctgatctcatctccgtacgtgaggggccgcaggacgacacgaaggtttccattcatggatgcagcgctggttttcttagccccgtaacctaagtcaattcaattacgacttcattgtacaggacagttcccttgtgttttcacttgacacagttgtattggtagacctggagcacttttgaacctgattccggctagaccgttgtatcaagcag

SEQ ID NO: 11538 - DNA, 363 bp, Triticum aestivum
  Clone ID: LIB31-022-Q1-E1-E4
cctatagtgagtcgtactacacctcaagatgttgtgccgacccagtctacaaggtgctcacaaggggtatgatgtgcacgcgtgtgttcatagggatgattgtatgtacgtatgtatcagcgtatgcatctgtactgtgttaagagacgtagataatcagacatctattctaaattttagtggtgaacactaatgaggcggccttcgcgtttgtatgagtgtatatatgcacacacacacacacgttgtacataagcatgattaaacctttatgcaccataatgacacctatatgcacagttcaagtctcaatgacaccgccatgcttttaaatgaaaagcggccgctctagacgatccaagc

SEQ ID NO: 11539 - DNA, 236 bp, Triticum aestivum
  Clone ID: LIB31-022-Q1-E1-E6
actactccctaaagtgagtcgtactaccccaacttctttgttgatttcgggaccgagcctgaaggtccctccttggcccatgagatgagatatcctggtggaaactgcacctctgacatatggatttaagacgaaaggtgtatgacacatgcagctggagattcatggtgtttagctcactgttattaaaatggtctcctccccgcctgcggtgttttatgtgatgtggtatcaat

SEQ ID NO: 11540 - DNA, 445 bp, Triticum aestivum
  Clone ID: LIB31-022-Q1-E1-E9
tcactactaggactcgtagtccatcgctacaccctatactgagtcgtattattcaaaccaagacacttaattagtttgttcgttggcgtattcatatagtcaaggctgatcatagtggggagtaacttatactagtgtcagggtgaaatgcgcgacggaggagaagcggggtggaggccggttggaacgctggaggtgacggagacgtagagttctggcagggttgtggtgtggcgtccgggatgatggagcagcggcgaaggcaagagagaaataatgaaggagagagaatgatgaggatgaaggtgtggggtccggaaagggttttcgatgggccagggtgttggagttctacatgtatgttgtccaggcttccgcaaggccacacacgtttgtctgaagtttgctgaaaaaagtatgtctggaccactcggcggaccgatat

SEQ ID NO: 11541 - DNA, 414 bp, Triticum aestivum
  Clone ID: LIB31-022-Q1-E1-F4
ccggtctagaattcccggatcgacgacgaccttcagatccacggacttcccgaggacagcgttagccgcttccggcagtccgcccctctgactcgatgaatgggcactttgatacgcgagggatttcgctgtgggggataacgtttcgcatgggactagatacgtgcacatagagctcaggagaataccagaaccaactataacagcggcgatccagtctctcgagcactatcagtcccgccagatcaggcttctcgggcgcgcacgtggactgcactatgatcgagaatgtgcgaattgccgcggccatcgtcggcagacgaatgtaccaccaaatgtcctggatccctgcgctatctctggacagctccaccagatcatcttcacactaatgtaacgtgatagatgcccacc

SEQ ID NO: 11542 - DNA, 412 bp, Triticum aestivum
  Clone ID: LIB31-022-Q1-E1-F9
accctatagtgagtcgtattacccagcagcactcataggcggcttctcggcattttccgtttactagacaatatactagtattaaaacgtagcggaaacagatggaactagttgctgtcattgtttttttttctcctgcagtaccggagatgaatacaaaaaccctggaaccaagtactgaaatgaatactaccaaaaacgaaaatggaacaaatacggcacggatacggagacgaaagccgagtgttaaccggaactaaagaccccttgaaccatagacaaaataagaagaaaagaacaaacttgttcagttaataagatgattactaaatattatgatataccatgactataaaataggatatgtcagcgacagcggtgtgctcgattaaggattttctctcgtgctggc

SEQ ID NO: 11543 - DNA, 424 bp, Triticum aestivum
  Clone ID: LIB31-022-Q1-E1-G10
cccgggccgacatcacggaggatcctgacttcaacaacatgtacgagctgtacgacccatcaacggtgatgtttttcttccgcaacaagcacatcatgattgatctcgggacaggaaacaacaacaagatcaactgggcaatgaaggacaagcaagagtttgttgacattgtggagactgtatacagaggagctcgtaagggccgtgggctggtgattgctcccaaggattactccaccaaataccgttactgaggtatctgtgcttggctattcaggtgcagtgtgtggcctgctctgttctgtgaagtgcgctgtgtgacccttgatgtaatgtctgtcaactttgaaagtgtcgcgtaactatgtatttgtatcttgaatatcaacatgtcataaacctgtaaccctttgaaacaagacct

SEQ ID NO: 11544 - DNA, 375 bp, Triticum aestivum
  Clone ID: LIB31-022-Q1-E1-G8
tacggtctacaattcccgggccgacgacgacccctactacaccggaggtgcctactactacgtgctgcccgctgacgacgacctggagtagtttaggaggatcccaggcaggaggcctgcgcctctttcgatctgtatcccagtttgtgctagccttcttaaggcaacttgtttaacttatgtctgtactcagatattgttgcttccgctgactcgtctatgatcgagcacttgtattcgagccctcgaggcgcctgggcttgtattatgatgcttgtatgacttagtttatgtgtggagttgtgttgtgatatcttcccgtgctaaagaaaaagggggggatggggggaaagaagcgggcgcgctagaggatcc

SEQ ID NO: 11545 - DNA, 396 bp, Triticum aestivum
  Clone ID: LIB31-022-Q1-E1-G9
acgcgtgggccgtcgtaacaccctatagtgagtcgtatcacatcgaaagacgggacacctctgcctctatcaagtggtatcagatttccaggttgctcggtgagattttacagtttttcgtagtttagatcgagtctgttcttcatacctacagtccacgaaaaagccacaaaaaaaaattagggttagttcatcatatccgaaccaatctgagcctttgcataatctttttagggttttgctttgttgaatttgcggttgcatcgtcgtgtctagttgctggtcttagagtctagtcttttagagtttcgagttctggtcataagttgtcacgccgccgccgcagcatcatcgcccctgccatctaccaccaccgcgtaaccgccagcgctccga

SEQ ID NO: 11546 - DNA, 438 bp, Triticum aestivum
  Clone ID: LIB31-022-Q1-E1-H12
ctcgtagtccatcactacaccctatagtgagtcgtattatgcggctattgacaaacctggcacaatgctcctcacgcattatcggcaatgcaggagtggtacacgatgacatgatggcacacacacatttgggcgatgacaagcttctgatcattcctatgatgaccaccggtgtactggaagtcgaagacggccactttgtacatgtcaaccttagcaagcaaattcatcatggtgttgatggagtcctccgccgatgccgggttgttggtgtacaccaccaagacgtcgttcgccctcatgtgggtgtccacatgatacacaccatgctccattggagcgccactagatatcttctctgtattacttcgatgcatctttcgaccgtcatgtttattaggacacccatcatcagtgttagctttccttgcatgatca

SEQ ID NO: 11547 - DNA, 57 bp, Triticum aestivum
  Clone ID: LIB31-022-Q1-E1-H2
atagtgagtcgtattacttccggtgcgtcgtcctctgcgcggtgcagcgatcggcaa

SEQ ID NO: 11548 - DNA, 99 bp, Triticum aestivum
  Clone ID: LIB31-022-Q1-E1-H8
ctcgttgtctgtaactacaccctaaagtgagtcgtatataatgttttctagatagcagagattaaatatctgccaccgcaacaggttagatttaaaaca

SEQ ID NO: 11549 - DNA, 398 bp, Triticum aestivum
  Clone ID: LIB31-022-Q1-E1-H9
acgcgtgggccaacatgacgccctatagtgagtcgtattaggtcctcttcgcctccgtcttcctcctctccgcctaccaggaattcactgaatttggaactgatggcgggccagctgcaaagaatcttgagcctaagtttaacagcttcaccagtgatatatctgtacacctcggagttgtggtgcctcatgtagagttgaagcatgtgattgctgctagcattggtctgaagggtctgggaggtctgctgtttatcttgagcagttcatttggtgcttatctcctggccctctaccttgctttcatcacaccggttgtctatgacttctacaactacgacatggagaaggctgaatttgtgcagatcttcatgaagttcacagagaacctggcgctg

SEQ ID NO: 11550 - DNA, 353 bp, Triticum aestivum
  unsure at all n locations
  Clone ID: LIB31-023-Q1-E1-A1
taccggtccagaattcncgggtcgacacgcacgcgtcacatctgcactgtgatctgcacgcccagattaggaagatcatcgccgatcaagatcgcgacgaccacattttttgtgtccccccaatgctcataggtgggcaacctagccacggatccaggctatcaaaactcgcatccagtgcggatctatccgttgcaagggtatccgaacagtgtgacacaagcaaatagtggagtttgagatcggcggaagtactgtaaaacggtcgcgtactacatgtatgtgcagatgtacgcatcacatgccttgaggcgttctgtggtactaatcggaccacaatgcaacggtgaaaa

SEQ ID NO: 11551 - DNA, 447 bp, Triticum aestivum
  Clone ID: LIB31-023-Q1-E1-A11
attcccgggtcgactttataagttgtgagggttcaagtccctctatccccaaatcctcttttattccctaactatactatattattattatttatcctcttttttttctttttatcaatgggtttaagattcattagctttctcattctactctttcacaaaggaatgcgaagagaactcaatggatcttatcctattcattgaatagatttcttttttattagagtatcggcaagaaatcttggttattcactctatttttaagttttatttaagtaaaccatgcacaatgcataggactacccccccattttcaaattttaaatttgaaatactttaattaatttttagtccttttaattgacatagatacaaatactctactaggatgatgcacaagaaaaggtcatgatagctcagtttgtagagcagaggactgaaaatcct

SEQ ID NO: 11552 - DNA, 456 bp, Triticum aestivum
  Clone ID: LIB31-023-Q1-E1-A12
ggtaccgagtccagaattcccgggtcgacgaaccgaccgcatgacgcaatcaaaatcaacagtgtactgaaatgtaaccgaccgccggaaatcgcatttggatgctgacgagtagcgccagtaccgaatcccatcctcacctagaaatggccctgcgcggtctcctcggctgggttgccggacagatcactggtggacgacacaactagcacactttgattaagtagaaagtacatccattagatatataaactactaatacgcatacgtgaaaagtgcacgtacggtggatggactagccaaaagtgcagcctcgttcttaaatggtaaataataaagaaaaggaatgatagatggaatcttccctatatggtgccaccgatctggatcgccattgaccggtcctcctgtagtgcatgatcatccgaaggatcgaggtcccagcccccaagcccg

SEQ ID NO: 11553 - DNA, 429 bp, Triticum aestivum
  Clone ID: LIB31-023-Q1-E1-A2
gggtcgacgaacctactcaaaatgaagatgttgagctggctgccataaagccagaggcggtggagcatgctggtacagaggccgatccaagtaaagaagcatctatacctcctcaagaggaaaccactgctgtagccttggttacaggaccggaacaaaatgaagaagcagatgcacctactcaagtcgaaccagttgctatagtgccagattccatggagcatgctagtaccgaagttgatcaaagtatagaaacatctgtgcgtctcccagaaaaaacttctgttatacctggtacggaaccagaagagaagaaagtagaggcatcctcgcaagaggataatgttgaagcagttgctgcagagccagaacctgctggattccaggaaaatgcagaagtttctaccaagcctagtcctatggagatag

SEQ ID NO: 11554 - DNA, 423 bp, Triticum aestivum
  Clone ID: LIB31-023-Q1-E1-A5
gggtcgacgtgtgcgagcatgactgggtcccaacccacactgcaccgagcatttcggaacaacagcctcaggcactcctgcttgcggtagggcctgaccagtgaccagcacgctgcacgcagcaccatcccgaacagccggtgaggtcgccggcgccagcgacagcgaggtgctccttcatcatcccgtatgatacgacacgcttcccgtttcccctaggcacggtatcgatatggccaaccaagtaataccactccgccgtagcacgcagccgatgcaccaccgctccgccgtagcacgcagccgtcacaagaatgagatggcgctgtcagtcaattgactcagttccacctgcacgagtacagtccaagaatcatggtcacatgattgtcccgatggaggatggttcagacgttcagtccc

SEQ ID NO: 11555 - DNA, 442 bp, Triticum aestivum
  Clone ID: LIB31-023-Q1-E1-A6
attcccgggtcgactcccctagggtttctggaatatttgtgaatttatagagctgagaggcggtgcaacagagctacgtgtgttggttctatatccggcatgtcttgtagtaggggtcccaagctaggcgtcttggagcggtggtaacacggacacaggattttacccatttttgggctctctcaaagagataataccctacgtcctacttttgattgtattgatatgggtgtagtacatggtacatttatctaccacgagattgttctaatgaatattagatcatgtattgactagcctggcctcactttatataatgtaccagaggcctagggtttagaagagccttcatcttggggccaagtcttgtggaatatcccttgtatgcgacataggctgctagaactggcccaatagtgaaacgccatggggggtcctcttc

SEQ ID NO: 11556 - DNA, 441 bp, Triticum aestivum
  Clone ID: LIB31-023-Q1-E1-A7
attcccgggtcgacttgcaaagtcaccagagcgagttccacttcctcctccttttgcaagttataataccacctcaagagcagcaccatcttgggcaaataacttccgaagtgtgccttctaatcttagggaggaggcgactttagattcaacaatcacaccgtcagttacacccccaccagctgcagatgctagagcatcagaactccaattctgcccagtttgccttgccaaaccccgggacatggcatttggttgtggtcatcagacttgttcagggtgtggaccgcaggtcgtggattgccctatctgtcgaaggccaattgatacaagagtaaaactatactaacagcctcacatgcctgactaggtttgactgaagtacgctggagtgttgaaagtagaatccatggaaaagaaaaagaactccgtttgcactgt

SEQ ID NO: 11557 - DNA, 345 bp, Triticum aestivum
  Clone ID: LIB31-023-Q1-E1-A8
ggtcgacctgaaggccgacaagaagaagattaaggccgctgtcaagaaaatgtacgacattcaggccaagaaggttaacaccctcatcaggcctgatggcaagaagaaggcgtacgtgaagctgacaccagactacgatgctcttgatgtggccaacaggatcggcatcatataagtcagagggagggtcctgcagtaggcgcttgtgtcgtggtttcgtgtgttattggaattttgtagttgttacttagcaaaggggctcagtggctcgattgcctaccagagtggctgcacactttcatgaatttgaggcaatcgaagtgacttgttgttgagctttgcgtt

SEQ ID NO: 11558 - DNA, 442 bp, Triticum aestivum
  Clone ID: LIB31-023-Q1-E1-A9
gggtcgacaaagtcacgagcacggtcgaaaacacccctccaacaaaagagaagatcgatgtctacatgtcctactcaaaggaaaaacttagcaaacttgtacaggcatatgtcggcaagtatgtcaaggcgtagcaccaccccgccggccaaaatggcgacatcgggcgtctgtctgtttttgtgccttgtgtgacaggaagaatggaaagcagggtttaggtggcaagggtttctttttgttctgtttcaggcgccttgtgcaaatgttgcctagtgttgtatcatcgtctcctccttttgtacaacaacaccatttgaaacatgaacctcctgtagcggtagatagatataggttatgcaaaagacgtgggtcggtcgtcgtcgtcttcatgaacaccgcaccgggcgtgttcggtgtttgcatgcaagtagaacttgac

SEQ ID NO: 11559 - DNA, 449 bp, Triticum aestivum
  unsure at all n locations
  Clone ID: LIB31-023-Q1-E1-B10
attcgcgggtcgacccaattacctgtcagttgtttcctaatgtttgggatgtcgtctggggtgaatcttggaacaacccttgcttcgcaagcactagtgaatttaagagcagaaaccccgcagtcgaacctagacgacaaaaaaatatggaaaacagtatgttcttagttacctaatctcatatatgtactagcacttagatgacctagataaagaagaagaacatgacatatcaaccggttttgagacgtatggttgcttactcattgttttgcttcggtacatcgatattgattagtttaaaaccatccatgccaatatgagattttgggtaatgagtcgcccatagaattcgaacacttgaaaccatacgccttgcgcaatcatccagggacttgttggcaagagtcctccgcgaatcgagcacctcanactttctgtcccttaaa

SEQ ID NO: 11560 - DNA, 467 bp, Triticum aestivum
  Clone ID: LIB31-023-Q1-E1-B12
gtaccgatccagaattcgcgggtcgaccattccataggaagggcatcaacactgtcaattgcagaggcttggacctgcttcggcatccagtagagcaaacaagaaggtcaagccggaaacaaatatttcatcctcgttcggacttctcatctcgcaatggaagccaagttctttcggttcctgaagcttgttggagttggcttcaaagccaggacagagcgcgaaggccgcgagttgtttctgaaactgggctacagccatgaggtgcagttcaccgctccacctgccgtccgcgtcttctgcttcaagcccaacataatatgctgtactggcattgacaagcatagagtgcaccatttcgctggagctgtccgatgcagtaaacctccagaagtgtacaaggggaagggcatactgtacatcgacgaggtcataaagctgaagccggggaagaaacagcagaagaa

SEQ ID NO: 11561 - DNA, 416 bp, Triticum aestivum
  Clone ID: LIB31-023-Q1-E1-B5
gtaccagtccagaattcccgggtcgacatctttaccaaacatcacatctcatatgctaagcactggaccgtcaatcgcgttggcatcagtgtgggcgctcctgagcatcattctgaccactgcagccttgggattagtcgtcgacgctgtggctggtatgccttcctaggagatctggtggcggcattgaatgccataagcgcctgtcgcatgtattccactaattgcgcactacctcgggcatctatttcaaattcatagaggacgcaacaacttggtatttcctcatcatgagaatgagcttgcacaaagtcgagcagcttatccagacggtcgcgtcaaatgctggatgcatacatgccttactagcaatgatgatcatcttctgtcatgatcacttaataccttcttcagga

SEQ ID NO: 11562 - DNA, 441 bp, Triticum aestivum
  Clone ID: LIB31-023-Q1-E1-B7
gtaccagtccagaattcccgggtcgacacgagaagacaacagaagggtggctgacgagcctgcagattctgattgcttgaaacactttgatgttctgcagtgccctccggaccatcactaccttgaaaacataccacatggtaccggtggaagaaagtgggtcaaaaaagttcagcaagaatggggcatacttgagaagaatctagcagattatatttatgtcagggtatttgaggatcgtatggatctcatgagagctgtgattattggagcaagtggcacaccataccaagatggtctgttcttctttgacttctaccttccacctgagtttccacaagctcctccgtcggcatactatcagtctggcggcttgcgtgtaaatccaaacctttatgtggatgggaaggtttgtttaagcctcttagatacttggaccgg

SEQ ID NO: 11563 - DNA, 358 bp, Triticum aestivum
  Clone ID: LIB31-023-Q1-E1-B8
gtaccagtccagaattcccgggtcgacttccaccaaagcgatatccatcatctcatcgaaagacgggacacctttgcctctatcaagtggtatcagatttccaggttgctcggtgagattttacagttttctgtagtttagatcgagtctgttcttcatacctacagtccacgaaaaagccacagagaaaaaatagggttagttcatcatatccgaaccaatctgagcctttgcataatctttttagggtttttgctttgttgaatttgcggttgcatcgtcgtgtcaagttgctggtcctagagtctagtctttgagagtttcgagttctgggcataagttgtcacgccgccgccgc

SEQ ID NO: 11564 - DNA, 364 bp, Triticum aestivum
  Clone ID: LIB31-023-Q1-E1-B9
ggtaccagtccagaattcccgggtcgacgatcaaacctaccacgtgcacgtgcactcactcacttgagcatttccataatcaaccatattttaccaggatcatgtgtcaaagatcctgccaacacatcatacgagcatgatgcataccggtggaagatgcagctgcaagggaagatctcaccttctcgaatttcaccttagcgaagacacgggaagtatctctcgatgatcaactcacagatattcaccagtccgcatccaatgatcacattgctgtgctagtgtgacacattcaacgatatggttggttaactacaatatcactttgcaagtctggctacgtgatatcaattatccataaggg

SEQ ID NO: 11565 - DNA, 430 bp, Triticum aestivum
  Clone ID: LIB31-023-Q1-E1-C1
gggtcgacgacctatgtatgcatgggcatgtgatgtgagtaaaaccagacggagagggagagggatatggaatcagatgaacaatggagaaacgacggagatggagggcgcatcggcgatgctcaccggtggtgatgtgctctgccgtggttgcatggatggcatggggaatacaagcgatctcttggacgtcatcgatgcgacgatgatgacgttgggtgccatggttgagatgttcttgggcaagagcaccatggatagatgggacagtgatggagacacgacgaatgtgttagacggggaaagtgagggatagaggagggattctgccgatgatatggagatttcacatacctctaattagtacttgccaaggttatatcaccgctctactactatcaacttagtactaacgtgggtttgtacccct

SEQ ID NO: 11566 - DNA, 465 bp, Triticum aestivum
  Clone ID: LIB31-023-Q1-E1-C12
gtaccagtccagaattcccgggtcgaccatgcactgtgacgcttcagatattacaaatacaagttgccacagcccaaggaagagccgcatggtgataaccttctggaggaggaagaggacgataaggaagaaagggaatatttagctacattgacaaagaagcaacttctattccttgaggaagatgacgctacatcggaagaggatgataaccttatggataaaactgaggatgattgtagtatggagtttcttgaggagaagggatttttcattagctttgaagaagacggaacactcgattggtttttctactctgcttactgcgaatgtgcttccctgagtgactatcaacgcctagtcctaaaaaaattatggtggtaccgagtacagcatgtggagtgtctaccctagctaccgtcatagctatgatattgaacgagagtatctcaagtactgccagga

SEQ ID NO: 11567 - DNA, 340 bp, Triticum aestivum
  Clone ID: LIB31-023-Q1-E1-C2
tcactttgttgccattgacatctttaatggaaagaagcttgaggatatcgttccttcatcccacaactgtgacgtcccccatgttgaccgccaagattatcagctgattgacataactgatgatggatatgtcagccttctaactgagagtggcaacacgaaggatgacctgaagcttcccactgatgatgttctgcttggccagatcaagactggatttgctgatggcaaggacctgatcctgtctgtgatgtccgccatgggtgaagaacagatctgcgctgtgaacgaaatcggtggtggcaagtaagcagctgtgcgtggttgcctacctgcgata

SEQ ID NO: 11568 - DNA, 379 bp, Triticum aestivum
  Clone ID: LIB31-023-Q1-E1-C4
ccgggtcgacgagccaccctgtgctcctccgatgacggatcccaggagccagacaacacctctgatgactactgctaccatgagggtgcctactactacgtgacggctgctgacgacttggagtacttaggaggctcctatgcaggaggccttgcctttcgatcgttgttgattttgtgctagccttcttaaggcaaacttgtctaacttatgtctgtactcagatattgttgcttccgttgacacttgtgtattcgaggttatgtattcgagccctcgaggcccctggcttgtaatataaagcttgtattattttaaaagaaagaacatttccaaacaaaaaagcagccgctctacaggatccaagcttaggtacgcg

SEQ ID NO: 11569 - DNA, 448 bp, Triticum aestivum
  Clone ID: LIB31-023-Q1-E1-C7
gtaccagtccagaattcccgggtcgacggtgacggagatgaggggctttatgggcctgggagcctccacaggcgcgagggtcacgttgagcaccgtggatcggccgtcgtagtccacccaaacttgcatggcatcgccggcgatgagagtcaggttcttgaaatcgccagtgtcgtcgtcgtagtagcctgcaggttcggccacgacggatgccaggccgttcacgtcaacgccgacgtggttgctgctgatgtcccgaaactccgggttgaggatggtgtcaagctcgacggcgaagacgtggttgctcgcgttgccgttgttctgggggttgaagaggccgaggaactggctgggcgacgccatggacaggtttttggtgggcgcgacgaagaaggcgaggccgttaccgcccaacgtgaccaggtcggtgacaatggcgaacacg

SEQ ID NO: 11570 - DNA, 221 bp, Triticum aestivum
  Clone ID: LIB31-023-Q1-E1-D11
gtaccagtcgagaattcgcgggtcgactgatggagaaagcatgaagagaggaacccttgtagggaaaggtgaacaaaggaaatttgcggttatattctcgaccatgcagttggtgatcgtgaatccggccacggtgttgggttttccggtgtgcctcccacagcattagtccgaagcttacataagggaaagagcttcaagtttgggtctctgcagatgtt

SEQ ID NO: 11571 - DNA, 443 bp, Triticum aestivum
  Clone ID: LIB31-023-Q1-E1-D4
gggtcgagccagatccaccaacgcagcgcaccggctcctcttatttcggctacgtcacatcaccgatttcacacgcaatggatgggcaaagcagaaagcacaggattttgatggtgtccgacttcttcttcccaaactttggtggtgtggaaagccacatctattatctatcacagtgcctccttaagcttggccataaggttgttgtcatgacacatgcatatggaaaacgttctggagtacgatatgttactggtggcttgaaggtttattatgtgccctggaggccattcctgatgcagaatacactacctagattattcatgacatttccaatcataaggacaattccttattcctgagatgatatctgttgtgcatggacatcaggccttttcaacactgtgccacgaagcgttgatgcacgcctaggacgaaggggt

SEQ ID NO: 11572 - DNA, 414 bp, Triticum aestivum
  Clone ID: LIB31-023-Q1-E1-D5
attcgcgggtcgacttctactatgaagaggaatattcccatcctcagcaacctccctcttggtatggtaggccactttgtaccctctgcctgacagagtgtgatatggtgtttggccgagttatttttggagaacgaggcgataacatacgccctttgaagctctctctctctacagggtctcttgtagttttgcaagggagaagtgctgatgtagccaagcgagctattcctgctacacgtaagcagcgaatccttctaacttttgggaagtctgtggcaagaaaagttgcaccatctgaaagtgcttcacggcctactgccccgttaacacctccttccatgccctggggtccaccatcaaggccagctaatgtaaggccacactctccaagtccgcagcacttccggtata

SEQ ID NO: 11573 - DNA, 394 bp, Triticum aestivum
  Clone ID: LIB31-023-Q1-E1-D7
taccagtccagaattcccgggtcgactcccctagggtttctggaatattggggtatgtatagtgttaagaggcggtccggggggaatccgaggtgggcacaacccaccagggcgagcttgggcctcctggtgcgccttggtgggttgtgctcccctcggagcacccccaggtgcttctttggcccattggttgtcgtctggtccaagaaaattctccagaaagtttcgctgcgtttggaccccgtttggtaatgatttcgtgcgatgtctaaagacatgcacaaaacagcaactggcacttggcactatggcaataagttagtaccataacctgctataaacatgactacacaatgattataatacatcgaagattgatagtatagcagcatgg

SEQ ID NO: 11574 - DNA, 461 bp, Triticum aestivum
  unsure at all n locations
  Clone ID: LIB31-023-Q1-E1-D9
ggtaccagtccagaattcccgggtcgacaggaacagggcacacagagatggccatgatagagattatccgacggatagcagagtgcatgtttcaggtcccgagtgtttcagcagagccatcagagcagcagtgattcctcccaacttcaggttggcgactggagtcagcaagttcactggtgagtccaagcctgacacttggttagaggactaccgagtggttgtgtagattggtggtggcaatgatgaagtggccatgaagcaccttcctctgatgttggagggctcggccagagcgtggttgaatcagttagcacccggcagtatttatagttgggaggaacttgcccgagtgtntgttagaacatttgaaggtacatgcaaacgactagcagggctaacaaagctacaatcttgtgtgcagaagccgaatgaaaccttgaaggattatatccagagat

SEQ ID NO: 11575 - DNA, 433 bp, Triticum aestivum
  Clone ID: LIB31-023-Q1-E1-E1
gggtcgacacacacttcaatgatgcaacaatgtatgctgatgaaggggacgaggttgttgaaagggtgcttggctggataatgaagctcttccctggagggccaaagcgtcgcaccagcaaactccactagcgaaaatgaagctttagtatacagaatgtctcttcatttacatatattttttgcccggttttggtcatagcatcgtgagaagttgtatattggagccatttgatgtaaccattcttttttctttctacagaagatgacgaaaatgttggagctatacaacgttgtattggacagtaaacagaatagcctccaagaatcatttcctcccatcttatattttgtcgctatgggttgggggtggatatgtaaaagctgttattcggtgattgttgaacggttgtaccaaaagcatttttcttttc

SEQ ID NO: 11576 - DNA, 461 bp, Triticum aestivum
  unsure at all n locations
  Clone ID: LIB31-023-Q1-E1-E10
gtaccagtccagaattcncgggtcgacaacatgacaaaatttctcaccaccatctagttttgctaaaatgagtttgtttgtcttaccttatatatatgtgaagaaaattgacggcagcaaatttctcctgaaaataagttcaaataaaaacatgggagaaggtcacatatgtgtaccaggaaaatgtttgcgcaaaaatgcagaagactttactatccatgagtttgtgtacatgctccttttttgtggctgctgcaggctgcaagacctgtcgtcgtcatccccacttagcccatgtcatgaagcttcgctcccctactactgctacacgtaagtgctcgtctgcaatttggcacgaagttgaacaactttagctagagttcagataactgaatggcagaggttgctctagaactacagtagtatacttcagagttcagagtgcagataattaaatgttc

SEQ ID NO: 11577 - DNA, 457 bp, Triticum aestivum
  Clone ID: LIB31-023-Q1-E1-E11
ggtaccgatccagaattcccgggtcgacatcgagccggatgcgcatgtcaagcaggcgatgaatgagatcaatgcagctgcaaggatgagggtggctgcaaacgagaaggcggaggctgagaagattgtccagatcaagcgtgccgagggtgaagcagaggccaagtacctgtctggcctcggtatcgcccgccagcgccaggccattgtggatggcctgagggacagcgtcctgggcttctcagtcaacgtgcctggcaccactgcaaaggatgtgatggacatggtgctgatcacccagtactttgatactatgaaagagatcggcgcatcctccaagtcctcggcggtgttcatcccccatggccctggtgcggtgcgcgacatcgccacgcagattcgcgatggtcttcttcaagggcagtctgcctctgaaaacaagcagttggctttgccg

SEQ ID NO: 11578 - DNA, 429 bp, Triticum aestivum
  Clone ID: LIB31-023-Q1-E1-E12
cgggtcgacgcttgcgccggaaagtttgttcaccatggcgatcgcgctggcgggctgcgcctggccttcggtgccctctaagctctacgctcctttcaccttgcgttgcctatggtgtgcccctgccatgtcagaaaaaaccttgctgggtcatggtgaatggtgtgaaatggaatagaaagacaattcttgtgcttgcacagagtggaagcgaatgtgatcggggggtcaccgtcaagagagtgcttccttggctcgttagcaaaggaaaatggtcactagtatactactcttgcagtcacaaggttcgtatatgtgtgttctgtgagctaaaaggatctatttctagcatctaaagaacttatggacattttagtatctatctgatgaactagcactctaggatggatcagtttcgtactgagacat

SEQ ID NO: 11579 - DNA, 421 bp, Triticum aestivum
  Clone ID: LIB31-023-Q1-E1-E4
gggtcgacacacggcccgcagaggtgttcttcctgcggtttgaccatatctttgagatgtttctgacaaagcggctcgattttacaatcgtccacctttttacactacatatgagcttcgtcatgaagagagaagaagtctcgcaaatctgtgtggcggatccgtactacatgcacgagtctttcttgagtctcggtgactttgagcgtgaaactgctagggactacctccaaaacttcatggtacagaataaggaccaggaaattggcctcctgccttatcatccaaagtaagtcaattccggacaaccctttcgtacatttcaatcattccttctcgctcatatggagaataatttgaggtgtcttttccccgcagcaacgggcgcgccgtccttatcgttctttaaccgcgagtctcc

SEQ ID NO: 11580 - DNA, 460 bp, Triticum aestivum
  Clone ID: LIB31-023-Q1-E1-E8
gtaccagtccagaattcccgggtcgactgccaccaaagcgatatctatcatctcatcgaaagacgggacacctttgcctctatcaagtggtatcagatttccaggttgctcggtgagattttacagtttttcgtactttagatcgagtctgttcttcatacctacagtccacgaaaaagccacaaaaaattagggttagttcatcatatccgaaccaatctgagcctttgcataatctttttaggtttttgctttgttgaatttgcggttgcatcgtcgtgtctagttgctggtcttagagtctagtcttttagagtttcgagttctggtcataagttgtcacgccgccgccgcaccatcatcatcgcccctgccatctaccaccgccgcttatccgccaccgctttgaatccgctgtcatataccaccaccgctgccatctactaccatatatccacca

SEQ ID NO: 11581 - DNA, 454 bp, Triticum aestivum
  Clone ID: LIB31-023-Q1-E1-E9
gtaccaatccagaattcccgggtcgaccatggcgtcttccaactccgggggcatccccatcaaggccgaacaggattcggatggctcggcccagagcacagctgacatgactgcttttgtgcaaaatcttctagttcagatgcaaaccaggttccaaaccatgtcagagaacatcatcacgaagatagatgaaatgggtgcaagaattgatgaattggagctgagcatcaatgacctcaaggctgaaatgggcagcgatggtatgacccctactaaagtgaaggacgaagaatcaaagccagcagacagctcttcctgagtgaagcagaagtagcagaagcaaggcgtattagtcttggttccatgtcgatatcatcagccattcatcactaacttactgcatgttatgagatgttatttgcactgttatatgcatatgagatatacagtacct

SEQ ID NO: 11582 - DNA, 426 bp, Triticum aestivum
  Clone ID: LIB31-023-Q1-E1-F1
gggtcgacttttccactatcaaccccaaaaaacccaactctgccttacgtaaagttgccagagtacgattaacctctggatttgaaatcactgcttatatacctggtattggccataatttacaagaacattctgtagtattagtaagaggaggaagggttaaggatttacccggtgtgagatatcgcattattcgaggaaccctagatgctgtcgcagtaaagaatcgtcaacaagggcgttctaaatatggggtcaaaaagccaaaaaaataagtgattttagcccttataaaaagaaaacggattcttgaacctctttcacgctcatgtcacgtcgaggtactgcagaaaaaagaactgcaaaatccgatccaatttttcgtaatcgattagttaacatggtggttaaccgtattatgaaaga

SEQ ID NO: 11583 - DNA, 466 bp, Triticum aestivum
  Clone ID: LIB31-023-Q1-E1-F10
gtaccagtccagaattcgcgggtcgacaggatctacaaggattttagcatgtcagttggtgtgaagaacattcgtgaatatgaagaaaagcaactgaaagatgctcaagcactgcaggagaggaagctaagtctgagcaatcaattatcgaaactgaaataccagctggaatatgaacaaaagagagatatgcatgctccgattgcaaagttaaacaacacacatgagaccctagagaaggagctgaagggcttgcaggagagagaaactcgtgctaaggctgatgctgaacatatttcaaatcagatggaagagctgaaggctgaggctgaagactggaagttgaagtcagatgaatgtgagacagcaattgaggaactaaagaaacagaatgatagtgttgctgctgcattggcaaagctggatcgccaagtgaagttaaaggaaggacagatagttcaactta

SEQ ID NO: 11584 - DNA, 459 bp, Triticum aestivum
  Clone ID: LIB31-023-Q1-E1-F11
ggtaccgatccagaattcccgggtcgacaagacgacagaagggggcggtagtgttcgatagttttcgatttgatagagagagagctagacgtagagcggtggagaagaggaggcgattccgtcccctttccccctgctggagcttaattttctctttgattcacggttgccatggttccagggtgttgttgtggaaagctcttgtagacgcagctatttgttcagcttcgcgggggacttcttggtgataatggaggctttgacaacgctctattcaagttatatatgaatcattgaatcattgaagaggaaattatcatgtgcttgaagaaggaatgttgtcagcccccattgttatactaaactctctgatggctttagtctgttcctctctttactgttgcactgcagtttcccagtgtcgtagttctgtatttaggccataattaatcttttttg

SEQ ID NO: 11585 - DNA, 468 bp, Triticum aestivum
  Clone ID: LIB31-023-Q1-E1-F12
gtaccagtccagaattcccgggtcgacctatcataggcacctcctgttcaatgagtggatgacatatgtcccaacgatgagccaacaggtgtttcctctagccaatgatgattttacacgtggaaactcctcattggtcggggttgttaatgagttatcggatccaaaacccgacctgatagcttaacggcgttccgttgcggtggatgccacatgtcggtcacccttgacgaaagcacttctgtgacgcgcgatttatcgtcatggaagtggacacttccgtgatgataattttggtaatgtcatggaacacttctacgacagcacaggtatgactaccttgactatgtcataaatttgtcatggatgtacatgcatgacaaaaaacgcgacctactgtgacaaacacgtatcatcacggaagtgtattttttttgtaatgtatgatggactcatatggaataactt

SEQ ID NO: 11586 - DNA, 425 bp, Triticum aestivum
  Clone ID: LIB31-023-Q1-E1-F2
cgggtcgacgtatcctgacagacttttcgcctcacgccgcttcacgacttcccggcgaccacaatcacaacatcaaccttgtttcctctagatcaacaatacctttcgaacaacctagctcatgataccacttgttagaataaatccgagacgctccgtcgatctattaaggaccaatcaatcacacgagcacgacaccgagatttgttaacgaggttcaccgatatggctacatccccggggcctgactatggacgctcctctcgtgacaccgtcacaattccacacccggtcgccctggacaccggcacatgccgccggcttcccccgcgttccggtgctattatgttggcataggctacatcgtgtgtctacctccgctatatatgaaagggctaggatacaagtgtcctattaggacataa

SEQ ID NO: 11587 - DNA, 430 bp, Triticum aestivum
  Clone ID: LIB31-023-Q1-E1-F3
ggtccgagaatacccgggtcgacagacgacagaaggggctccaattcaaatggctgataaacaggaaacatagttgaatgtacagacattgtatgagagacagatgcaatagatagtgtggaaaaagatggcatgaaatagttgacgtgtatattgtttaactaaaacggatagcatgacataatttcacatatatgatgtctatctaaactggatagcatagcataacataattcacagatatgatgaataactaaacaagatcacatgacataattcacctacatgttatctaagtaatcaggatcgcatcatttaattcacatatgtgatttatatgctaaacagagggcattagatatgatgtctgaactaagaacatggtgtttaatattgtgtatatgatgtctaatctagcctcggctttgtc

SEQ ID NO: 11588 - DNA, 455 bp, Triticum aestivum
  Clone ID: LIB31-023-Q1-E1-F5
gtaccgatccagaattcccgggtcgactttcactgtaaatatcaaactcctcatagacttatagatatctgtacactcacaaacgcattagtcccttaacctataagtcttcaatacaccaaaatcactaaggggcactagatgcacttacaagaataatttgaggtgtcttttccccgcagcaacgggcgcaccgtccttatcgttctttacccgcgagtctcccacgccgtgtatttcgacccttccagagactacgagaaaaaggactacacccacataatgaatattctagatgatgctctccaaggcttcagcattagaggtggccacatgcagatcaagaaacaaaggaacaagaagatgggtttcgcacataaaactaacttctcctgcatccatgttccagaaccaaacaagaaagatggattctacatcatccatctcatgattga

SEQ ID NO: 11589 - DNA, 313 bp, Triticum aestivum
  Clone ID: LIB31-023-Q1-E1-F6
aattcccgggtcgactcccagagtaaaggactccgaccagctcacctaagcatcttcgacaacttacgctcgatcatgtagtatcagatttgcaagttgctcactgagattttacagtattgctgacatgaaatggagactgttcttcatgcatacattccaatcatctgtccatatggaatatgacggttaatgcagcatagccgaatcggtcggagacctagcatgatctttggagggttattgctttgctcaatttgtggatgcatcgttgtgtcatgttgcttgtcataccgtctagtctgtgtaagtt

SEQ ID NO: 11590 - DNA, 457 bp, Triticum aestivum
  Clone ID: LIB31-023-Q1-E1-F7
gtaccgagtccagaattcccgggtcgacgttccgtcatcaagtgaaaatgcagctgttttcgtgccaagtgttgatgtacttgcagctgaagtcattccgagacctgctgcgactacacctgctgatgtgcccacaagttcgcttactagtatccctgtggatctgcccgtagctgcaaccacacctgtggatgcaccgcttgacatcgacagtcttacagaagagaaactgctgcacgagctggaggaaatgggctttaagcaggttgatctgaacaaggagatactgaggcagaataagtacaacctggagcaatcggtggatgatctgtgtggtgtcaatgaatggggacctctgctggcgggactgaaccaaatgggatttgatgacagggagaccaacaaggagctgcttgccagaaatggaggaaacatcaaacgacctgttatggacctc

SEQ ID NO: 11591 - DNA, 465 bp, Triticum aestivum
  Clone ID: LIB31-023-Q1-E1-F9
gtaccgatccagaattcgcgggtcgacgggaactttgggagccggagacactggtcgaacatataaagtttgatcatggttatacctcgaagagtccagcaattgtcaatctacttgagatcatgacagaatttactccggagcaacaacatgcattctgccagtttgtgactggtgctcctcggcttccacctggtggcttagcctccctaaatcctaagctgactatcgttaggaagcactcctcgactgcggcgaatacttcaaatgcagctggagcagcagagtctgcagatgatgatctgcctagtgtcatgacttgtgccaactatcttaaacttccgccatactcgacaaaggaggttatgcacaagaagctgctttatgctatcaacgaaggccaagggtcgtttgatctttcatagtgggttcaaaactaacatacagatggttggtgcacatgta

SEQ ID NO: 11592 - DNA, 435 bp, Triticum aestivum
  Clone ID: LIB31-023-Q1-E1-G10
attcccgggtcgactactaaaggaaacagtgctactctaccgttcttttattacaaacattaaacatatagtagtattatataccaactacaaattatttgaataaagaaaacataaatttgaataaagcattcatgaaaaccaagaattgaaagaaatcgaaaatttgaaaaggtatgtatcaattgaaaaaaagttcacaaaaagggaaaaggtttgtgaatttggaaaaagttcatcaaaatttcaaaaaaatctcattgaatttggaaaaagtttgtcaaatttgaaaaatatttgaaagggttcattgaattttttcaaaatcatacaataaaaagcattaaattttaaaataagttacagaatttggggaaaaatcatcaattttgaaaaaaagttcacaattttgaaaaaaacagtttatcaattttg

SEQ ID NO: 11593 - DNA, 463 bp, Triticum aestivum
  unsure at all n locations
  Clone ID: LIB31-023-Q1-E1-G11
gtaccgatccagaattcgcgggtcgactgaaactaattacgttcagggcagcgaccaacacaatttcctaaaagctgacctagagaaggtgaaccgaagtagaaccccatttgttgtgtttcagggccaccggcccatgtatacctcgagcaacgaagccagggattttgccatgagacagcagatgatccagcatcttgaactgctcttggtgatgtacaatgtgacccttgccctgtggggacatgtccataggtatgagaggttctgccccacgaagaattcacagtgtctgaacacatcatcaagcttcatataccctggtgcccctgttcatgttgtgatcgggatggcggacaagactggcaaccgatctggcaaccaaggcgtgatcatccagatgttcccatctttccacagcctgngatctccatgtaccgtggtggtgagttcgggtacacaa

SEQ ID NO: 11594 - DNA, 418 bp, Triticum aestivum
  Clone ID: LIB31-023-Q1-E1-G3
gggtcgacgattgggacgaatggtggcatgggaacaagactttgtctcaccacttgaacgactggtggaacggccgctagccacctcaaactccatccatctggatcgatccatgcatgtaccacccactatactactacctagttacagcaattccttttcatcttgctcaaccacttatgtactattagctagctgccgctggtgtctttttagttctatatttgttgtactgaaccagtcgtaagagagggagtttttagttccatctacctagtttttttctgcgttggagcaattcaggtgtactacacccgagagtagaaaacattttgttattttttggtgaaactttgcaaatacctaaaacatttgttcatgtttgatgtcacaaaatatatagtcaaaatttgcgtgc

SEQ ID NO: 11595 - DNA, 415 bp, Triticum aestivum
  Clone ID: LIB31-023-Q1-E1-G5
aactcgcgggtcgacaaaacggcgtatcttcatccggatgcatgaacttgctccttgcattcgccattcctaaaagagtagaaagtggagaggggtcagaaatgagaagagagaaactttctagggcttaagcttagtggtcgtgtcctacagtcaacgtgtgctctgataccaactttgtagcgaccagacctcaaatggcctgtgctgctgtgcaccagtgtcatccctggatcagtaatgctgacacgcacagtacaaatggaggatttataacagagtagcaatcacacacttattacatccaatatctccaaagagattaagtatgataagcatggcttaaggccatctaataacgataacagccgaagacttgggagataagtgaatccatcaactccagcggcatcac

SEQ ID NO: 11596 - DNA, 430 bp, Triticum aestivum
  unsure at all n locations
  Clone ID: LIB31-023-Q1-E1-G6
attcncgggtcgactacaagacgcatgtggtggcttcatcgatctcaaaatgatataccggttcaatctctcgaagatgcttataagaatatagatgcaagggcttatagggacgagtgtatgtatgcatgtacatgagcgtgtgagtcttagaaatctttggaagttacataggcggtgcgctggtggcgtacatgaattaccaatccaaatatacttgcacgaggctctgccgtaccaccacaactgcttcaggtcaaaaggtggccggtgccggtgcacatcacccgcaccagatccctccaaaacaataaaatctagtgttgtaaggtatcatttcatctgttccagcacgagcggccggctcagcatttccatctgagtagtccatccgtcttggaaaacttgtcgtaacctttgttaagcaatc

SEQ ID NO: 11597 - DNA, 388 bp, Triticum aestivum
  Clone ID: LIB31-023-Q1-E1-G7
aattcgcgggtcgactgacccaagttagtttcaatcgatttgcttcaagtgggaatagagggacgacatagcgatgtatgggttgatcttgagagtccgtccatgcatgatctatagtgctgctcacatgggttcacttccatgcgatgcatgcagaatctcatgagcaacatttagttcattaagcactggtcattagcatttaattaatcaaagaaaaaccagccgtcacagccattatctgaacggcaacacaatgtgttttatgcaatcattagtggctatatgtgcaatgaaaaagaaaaacctttaaaacttgcacacaatttgcattgaatttgcactttctgaaatatgcagagaataatataataatgcatctgtcgca

SEQ ID NO: 11598 - DNA, 324 bp, Triticum aestivum
  Clone ID: LIB31-023-Q1-E1-G9
gggtcgacttccatcaaagagatattcatcatctcatcgaaagacgggacacctttgcctctatcagaattagtattatccatagcgtgaagtagtattactagttgaaaagctagttttatcaactaaacaaaatcttggagacggtgctacaaaactaatcattgactgcattagcacttcggcttacagaagcaacaaataaaaaaagaaaattgaaagaaaaaaagcgggcgctctagaggatctaacttacgtatgcgtgcatgcgacatcaaagctcttctaaagagtgtcacctattttcatttcaggggctgtcgt

SEQ ID NO: 11599 - DNA, 429 bp, Triticum aestivum
  Clone ID: LIB31-023-Q1-E1-H2
gggtcgagcccttctacatgcgtgacaagatcttgggcagcgctggggaccggcaagtcgcgagttcttacctcgaaagcgtcattctggcaaaccaagataaggataacttcctcgtgccttactttcccgagtaagtccacccctcaaccggcccgtaacatatgaattcttacatttcgatcgtttctcttttaacattccgtgttttctgcagtgacacacgttgcacgctcatcctcctaagccccaaatattccatggccacgtatttcgacccggaccgtcagtcgaacgtagactacacaaatgtcaagaaggttcttgatgatgttctccccggctacgccaaatctggaggcaccttcaccaggcctattcgtaagtacggcaagcacgtgttctcccacaatacgatgttctgctgcg

SEQ ID NO: 11600 - DNA, 420 bp, Triticum aestivum
  Clone ID: LIB31-023-Q1-E1-H5
aattcccgggtcgacagtgcaaccggaaggccgctggagccccgcaagaacgccaccaagtttgtcagccaatgcggggccattgttagagacaacgtctcgatcgccgtccaggagtggaatgagccaaagaaggcacgaattgatggtttcacttttgtcgataagagaacaaaaaaagattgcttcaagaagcttatggaacatttcgttctacctccggaatacaacaaattcgatgaggagggtaacaagattgaggaaaacaaggagaggaggacgctagtcaaacagttcgctcttcataagatggccgacgcattccggaaattcaagcaaaatctagcccatgactttgtcaagcagaacaagactccggatttcaaaggacaatatgagaaactgaaacatgattggcca

SEQ ID NO: 11601 - DNA, 373 bp, Triticum aestivum
  Clone ID: LIB31-023-Q1-E1-H6
attcccgggtcgacgggccatgcaacgcctgccactacaccgacaagaatgataacaactactgcagcagcgaagctggctaccgtctgcctttgaaatgtgtacacgtacacaatggtacaaaccaagataacacaacacaggatagaaacatgttggctgaagcatcgacgccaactgacccaaagcattatgttactgacaggacttgtgtagcattatacgatgcatagaagctatcaactcatgggttccacgtcctcatggctggaacgtcgcttgtaagtgggccgttcgtgtattaccggtaacggcaagcaagtctaatgcaaggggtttcaagaatcgcgacaaacgctcctacgttttatca

SEQ ID NO: 11602 - DNA, 447 bp, Triticum aestivum
  Clone ID: LIB31-023-Q1-E1-H7
gtaccgagtccagaattcccgggtcgacttccaccaaagagatatccatcatctcatcgaaagacgggacacctttgcctctatcaagtggtatcagatttccaggttgctcgatgagattttacagttttcgtagtttagaccgagtcttttcttcatacctatagtccacgaaaaagccaaattttttttagggttagttcatcttatccgaaccaatctgagcttttgcataatcttttctgtatttgctttgttgaatttgcggttgcatcatcgtgtcaagttgctggtcctagcgtctagtactttagagtttcgagttctgttcacaagttgtcacgccgccgctgcaccatcgtcatcaccgctgccatataccaccatcgtcatcaccgctgccatataccaccgtcgtcatcaacgctggcatataacatcatcatc

SEQ ID NO: 11603 - DNA, 438 bp, Triticum aestivum
  unsure at all n locations
  Clone ID: LIB31-023-Q1-E1-H9
gggtcgacagtggctattaattgagtggtgggtgggctttgaatttctttgtcgtctgcattccaactgtcctggccgcagtccggccagggctctcctgataacgagagatactttagcgaacttaagatgtcaccgaaaggtgagcgttgaaagatatccgctgcggtgaactccatgatcggtgcccaatcggattcgatcagaaggggcgccggaagtttggagttcgggaaaggattccggggccccggattcacaaccttcatgagggacanggtcatggttctgctccattgccgtanaggttgcagccctcgaggcggtgtctagccatccgtcctcgatctgcgcagccgtctccaaattgaagatcggagcgggttcgagtacggcctccagggtactgtccggctgcagaactaaatcatgctcgcc

SEQ ID NO: 11604 - DNA, 461 bp, Triticum aestivum
  Clone ID: LIB31-024-Q1-E1-A1
acgcctgcccgtaccggtccgaaatatccgggtcgacatagctaaaactctaggtggttaaaccgaatcacacagaacaagggagtccttgctctgataccaattgaaagtgctagttatcgactaagggggggtgaataggcgatttttatgaaagtcttcaaaacatgagagttttgtagaaaaacaatagaaataaacctattgacatgcagcggaaggtagactacactagacaagccatagccaagtactcaatgaactgaaaacacgaagactattagcagctaggtagtatggatcaggatggaagatagtgtgaagccaaactacattagtcatcacacagtgaagtcaaacagataatgcaagcaggcaatgacttcacaaggacaaactgtaagtaaagagaagtaagaggtagaaccagttgcttggtgaggacagtgattttgttggac

SEQ ID NO: 11605 - DNA, 440 bp, Triticum aestivum
  Clone ID: LIB31-024-Q1-E1-B6
taccggaccaacattcccgggtccacacgtggcacggcacagcagaggcccattccggtgaagatgtcgggcctgtcaaaataagcggggcagcccattatcggcctacttgagtcaggcccatttacaggaccgcccatacaagttacacagaactggaccatcaaaggcccattcgagatgtcgacaatttcgagcccatcattagtttaagcccgttaacgaaccgctacgttttgtggcccaattgcggcccgagcttcttttggcctgttagcagcccatcgtcagttccagcccgttaatggcccataacgtcgtgcggccttttctcggaccattctgcagttgggccaattctagcccgctgtgaccttaggcctgtcctcggaccattcggtacatgggccaactcttgacccattttgtcgcttgacctg

SEQ ID NO: 11606 - DNA, 434 bp, Triticum aestivum
  Clone ID: LIB31-024-Q1-E1-B8
taccggaccgacattcccgggtccacgcgcgcctttgcacgtaagctttgagtgtttgtgctgcctgcagtgtgcttgatacaatcgtcacgctcaacgccggcggcatggtagtcatacgtcttctttccgtcctttctggaactgaatatgctgctgcttactcccagcccatgtcatcgtgttcgtgccaaagctgctacgcatgccaactgtggctgcaacgtgcctgactgtgcctgcacagaccggggacagcttgccatcctataggagacacctttgtgcgcactgctcatcggcctacacgatccacagttgactgtactgtccatggaccgactcggtcagctctcgttgtgccgaaaccgctctcatcagctaccgaatcgattgatcatacactttttaccagcttcctggctgaatgccta

SEQ ID NO: 11607 - DNA, 454 bp, Triticum aestivum
  Clone ID: LIB31-024-Q1-E1-C8
ggtccacggacacgcagtatgaaaactcactcaagggcaaggagaaagaagtagacgtggttcaccttacgcatctcaccagcctgcagtccatttaccatataaggaccgggttcgcccagtacgcctccaagccgtacacttccatgtggcaactgcggatcatgtggcccgtgtcatggctgtccatggtactgacgtgggcatacggttcttggttcacagttgagaggaattccatgaagaagctccggatgcagtcatgggctataccaggatacactttccattatggactgaacaaggataaggaggcaatcaatgacctgattgagaaggcaatatctgaagctggtaagaaaggagctaaagttgttagccttggacttctgaatcaggcgcatagcctcaatgggagtggagaactttatctgcagaaatacccaaagtgggg

SEQ ID NO: 11608 - DNA, 454 bp, Triticum aestivum
  Clone ID: LIB31-024-Q1-E1-E5
attcccgggtccacgagtgcgaggccaccctcaacgagcagatcaatgtggagtacaatgcctcgtacgcgtatcactccctctttgcatacttcgaccgcgacaacgttgctctcaagggatttgccaagttcttcaaggagtcaagcgatgaggagagaggacacgccgagaagctcatggagtaccagaacaaacgtggagggagggtgaggctccagtcaatcgtcacacccttaacagagttcgaccatcctgagaaaggcgatgccctgtatgcaatggaattggctctagctcttgaaaagctggtgaatgagaaactgcacaacctgcacagtgtagctacaaggtgcaatgatcctcagctgaccgactttgttgagagtgaattccttcaggagcaggttgacgccatcaagaagatctctgagtatgtgtcgcagctgagaag

SEQ ID NO: 11609 - DNA, 334 bp, Triticum aestivum
  unsure at all n locations
  Clone ID: LIB31-024-Q1-E1-E8
taccggaccaaaattcccgggtcgacaacctctacattatcacacatccaggtgaaccaagcccaaaagcagaggcgccgtacataccgtgctcacggacgcatcaatccttacatgtccaacccctgccacattgagctgatcttgtcagagaaggaagagcctgtgaagaaggaggctgataacgtcgtcgcaccaaggaaagctatctaagctaccggaatggatgcattcgtccaacagtcttagttgtagttcttctcaagtacctttgttggcagtgtttgttgcctccttgatgtntttgttaccaacattgagtaaggatttgtta

SEQ ID NO: 11610 - DNA, 478 bp, Triticum aestivum
  Clone ID: LIB31-024-Q1-E1-G5
cctgccggtaccggaccaaaattcccgggtcgaccccttgaaggagccacctatcgtcactgccaacactgtgctatccattcttgctgttgattatcccgtggacaaggtctcttgctatgtatctgatgacggagcttcaatgctgacttttgatgcattggctgagacttcagagtttgctaggaaatgggtaccatttgtgaagaagtatgacattgaacccagagctcctgagttttacttttgccagaaaattgattacctgaaagacaaagtccagccttcatttgttaaagaccgccgggccatgaagagagaatatgaagaatttaaaattaggataaatgccctagtttctaaggcattgaaagtccccgaggaaggttggattatgcaagatggcacaccatggccaggaaacaataccagggatcatcctggaatgattcaggttttccttggtcacagtggtggc

SEQ ID NO: 11611 - DNA, 312 bp, Triticum aestivum
  Clone ID: LIB31-024-Q1-E1-G6
taccggatcgtaattcccggggccacattgagcctgatatggatgtcaaaagggcaatgaatgagatcaatgcagcttccaggatgatgtcggcaacgatggacggcacagaggcccaagtgattctcaagattagagaaccacagggcaaaacccactcaaagtacgtgactggcgtggacattgcactgtagcgtacaggctaccgtgaatggtctgagacacaggtgcttacgttctcggcaaacgtaactggcactacagctaaagacatcaaggacatcgttctggtcagccatgtatttcgacacc

SEQ ID NO: 11612 - DNA, 468 bp, Triticum aestivum
  unsure at all n locations
  Clone ID: LIB31-024-Q1-E1-H5
taccggaccaaaattcccgggtcgacgacctcaacgggaccaacaccactgctaactcaatgatggatatacattcacttatcatgtccctcaatttcacccaaatcgagataaaaactgccaactttgccaactcatggggagatggggtgctagtgatggtctctggtcttgtacagaccaaagagtacagcaaccaaaggaaatttatccagatgtttttccttgcgcctcaggagaaaggttactttgtgctcaatgattatttccactttgttgaccaagaacaagtgcaacctgcacaggtgagagctcaggaagcctttgagaccaacatggcatccaacacagtccaaacaagtgcagagtacattcatgaagaaagtcaaacaatgcaagctgttccagtaacatctgaagaaaatgatgctgttgactgttacacttactctgagccancacagcaag

SEQ ID NO: 11613 - DNA, 365 bp, Triticum aestivum
  Clone ID: LIB31-024-Q1-E1-H8
tccacgacggcaaacccagcacggcctgcgtcacgtacagctggcacaggcacaggacatcacaggttgctccgagcatcgatgctgggacgacttgggcggaacagttatggctgtccgtggacctgttcaaggcgcaaaagcaaatgttggtatcagcgtcggcgggaagcatttctctctctctccagtctgagctgtggtcacagctccgtgacaaaaggatatacacaggtagcacagtatcagtgtaagcatccctgctcaatcaagtaaagctcagtttactcgtgacaattcttttatgctcggtacccgtcaatcagcggcagcccaacacgatatatgcttacgtacgcgtgcat

SEQ ID NO: 11614 - DNA, 456 bp, Triticum aestivum
  Clone ID: LIB31-025-Q1-E1-A1
tctagaattcacgggtcgacagagaaacacgagcttctggtcaattacattttagtactcacactttttgctgatgacttcagatctgaacctacggatatatgtgtggacctgaaaatgaaccgccagatgcttaaaccatattatgaccagctgggatgcaagtcggtgtcaacaggtgcttttaaaccattttttatgacgcttccagcacccctcaagttcccacaacaagtcacaaggagaaggcggcgaaaataaccatctcagtattggtttccatttgatatggttgtgataggaaaggtatgcattgccaccgtcgaaagaacctatgtgccctcagctcagtttcaccaatgtagtggagaaaatgattaccgtggttgttccgtttttgttttctattgtcgcttgggaattgctacaagagaggaaccatattacggatatata

SEQ ID NO: 11615 - DNA, 453 bp, Triticum aestivum
  Clone ID: LIB31-025-Q1-E1-A10
acgccggcaggttccggtgtagaattcccgggtagacagacgacacaaggggggtgttgatcctactgctgctgtgaaccgacttcgcagccagtcaagaggccgtaagcgtgagaggtcactgagcagagctgatggtgatgatgctatggaagttgatggccagcactctgacaagaagctgcgtatgaggtcgaggtctaggtccaaatcacgaccaattgaagaggttgtaccaggtgacgggatccgggatgttgctcaaaagaagaaggccatcaagaaatcgagggactctgtcaagaacaggaacaaggaggctcgccgtggagaggcggatcgcgtcatccccaccttgaaaccgaagcatctcttctctggaaaacgaggaattggaaagacccagatgcgataaaccagtcaatgtggacgttgctgcttgcaatcactcga

SEQ ID NO: 11616 - DNA, 391 bp, Triticum aestivum
  unsure at all n locations
  Clone ID: LIB31-025-Q1-E1-A12
attcgcgggacgacagacactaccaagcagtgggacacgatgtctcagcagcccagtatttgagtgttttacctctctagattatatttgcaagcgccgatttctttttggatgcctgcaaatgccgatgaaatcatcaatttcttcgctcggattgaacacaacttctgtcactgcacacgcacaaacacgcaaactgatccagaggtgtccagatttagtatgcatacatatgtgacagcgtgaacaaattcaatcttggacccagtcaaatatctatttcaagccgaatgcatggacaacatcagacgtgtgaagtgcacttccataggcatangaaaaacgatgctgcncggtgctttcagttaacaaagcacagtcactaatgagt

SEQ ID NO: 11617 - DNA, 452 bp, Triticum aestivum
  Clone ID: LIB31-025-Q1-E1-A4
cggtctagaattcacgggtcgacaacgctaataacgtcactgcatgcaaggataccttccgtgggcgtgtttgtgagtgccctattgtcaaaggtgtaaaattcgtgggggatggatataccaactgtgaagcttccggtgttggtaggtgtgagatcaacaatggaggatgctggaaagaaactaagaatgggaagacaatatctgcctgctcgcatgaagaatctgaaggttgcaaatgtccacaaggtttcaagggcgatggtgtaaaaagctgtgaagatattgatgaatgcaaagcgaaatctgcctgtcagtgcaatggctgcagttgcgagaatacatggggaagctatgaatgcagctgtggtggtaacaacatgttatacatgagagagcaagacacgtgcatcagcaaacaagctgcctcctcagtcggctggagcttcatg

SEQ ID NO: 11618 - DNA, 444 bp, Triticum aestivum
  Clone ID: LIB31-025-Q1-E1-A5
attcccgggtcgacccaaaggtttagcttttgctgagtatgaaacagaggagattgcccagtatgctgttaggctgttttctggccttgttcggcttcacaatagaacacttaaatttgcggtgcgttcttttttctccctggttatttaatttgctgtagtatagattgcagtgtgttgttctttgggtatggtgaattacattctctgtgaatagttgattctgggtccaatccaatacctgaggttcttggcattactaggtttctatttatatatttatttacaaagcagtagcaaaagattcaaccctgaaattatgccctttatttttgacagatttctgggcaagacaaagcatcttcaaatgtcaatgttcctgtaactcctaaaatgaagcctataccactatcaaatccacctcaaccaatgagatttggtgat

SEQ ID NO: 11619 - DNA, 353 bp, Triticum aestivum
  Clone ID: LIB31-025-Q1-E1-A6
gtctagaattcccgggccgaccctaggattgaatctcctcgagaatttgtttagccgaataccggtgtttgtgttttgccattatcgaggtgcagctcggcagggacgatgttgaactgtgctacttgtgagctgcactgtgatttcctcgaagaggaaaggatggcgcagtacagtagagataagtatttccctcagttaagaatcaaggttatcgatctactacgagaaccaagcaacacctctttagcagtacctacacataagataacagagactagcacccaacacaaacaatgggttgtcaatcccttgagggttaattgcaaggatcaactctcatagtgatagat

SEQ ID NO: 11620 - DNA, 444 bp, Triticum aestivum
  Clone ID: LIB31-025-Q1-E1-A8
gtaacggtctagaattcccgggccgacccaattcatcacagggatatcacccgacgcctcgtcctcctctccagatcagatcttacgcccgcccgcccgagtcttcttcgccgccaaaagcaaatgacgatgctctacgaaatccactcccatgcccaaatccaagacctgcaggcccgccccgatgagctgggccactccaacaagcgcatggatgtgaagcttgtctctctggagtcggtgcgcatagcgcgcgagtcgtatgcactcctctgcccgctgatcatggagtcgacgatgtggttttgcccggagctggaaatcctctcggagctggcaagcttgtcgctgggaattcaaaagctcaagcatgatgtgttagcccagctcaaggttcaggaggctaagctgggaaagggcgccctggaagccctcctactcatg

SEQ ID NO: 11621 - DNA, 371 bp, Triticum aestivum
  Clone ID: LIB31-025-Q1-E1-B1
aattcacgggtcgactgacattgatattcctgctgatgtcaaaaggcattataagctgttgcataagctcatgagcggaagcgccaacaaggaggggaatgctgcagaggaagtcttgtccctggaatctctacgcatggcttaccctaccttgagcatcacggatggtgatgatattgtttacttgttggccaagggcaccggcatgagggctatgccgacagtattctctgttgatctcagtatgcggactctgcgaggagtggcgaagctacccaagaggcaccttggttttatgcgctacttccttgccagtggaatctccaaacatatcaggactccaggtagaagtgattcgcttgggcaaactg

SEQ ID NO: 11622 - DNA, 446 bp, Triticum aestivum
  Clone ID: LIB31-025-Q1-E1-B2
tccagaattcacgggtcgacgccgtcgagaaagcgcctgatgcgggacttcaagcggctgcagcatgacccaccggccgggatcagcggcgcgccgcacgacaacaacatcatgctctggaacgccgtcatcttcgggccggatgatacgccatgggacggaggcacgttcaagcttaccttgcagtttacagaagattaccccaacaagccgccaactgttcgttttgtctctatgatgtttcacccaaatatttatgcagatgggagcatctgcttggatattctacagaaccagtggagccctatatatgacgttgctgccatattgacttctagtcagtccttgctgtgtgatccaaaccccaactctccagcaaattcggaagctgccagaatgttcagccagaacaagccagagtacaaccgcaaagtccgcgagatcgt

SEQ ID NO: 11623 - DNA, 451 bp, Triticum aestivum
  Clone ID: LIB31-025-Q1-E1-B3
gtctagaattcacgggtcgaccgccacagataccttcgtactcgataggaaagtcccctcccactaacgcacatcgccgaagatgctgaagtaaatttagaaataatgcgagtagtaatatcaagtctaagacttggaactttgatggactgggataccactgttctcctaatcatccaacagttcacaataaaaacaatataatgttcattaagtcatgtttctgagattattttatacgtgcttggcacgtgctttttactagtatgagtatgtacatgttttatattgtagtatatattactactatgttagtctggaagcatataccttttgttgaatatacactcttttttttcagtgggggtatatatataccgcatattgcgactctttttttgggtaaaggaacatatgctatttacatcagtatacttcacaatatagttta

SEQ ID NO: 11624 - DNA, 438 bp, Triticum aestivum
  Clone ID: LIB31-025-Q1-E1-B7
ggtctagaattcccgggtcgactccatacatgaaatcgagagccagtctatgagaaaacgggcatctgcatccagcagctcaagcaacaacatttcatcggacacttacagttcttttcatagctatggcaccaaagagactgacagctgggtgaggccacacctggagcatgatggctcaggtttgctgctgcaagcatacgatgatgacattgagaaaatctgcgctgtgatgaatgagctagcaggtggtggtgtcgatggttctgctgatcgtatcatggatgagacgctttactcgaatggcgtcgatgatttcatgattctgccagcaggcaagaatggggagaagaagaagcagctaaccatcgaccaagaattcgagcagtacttctcaaaactcatgctttagcgtgatcgtaacagagaatttgctgc

SEQ ID NO: 11625 - DNA, 397 bp, Triticum aestivum
  Clone ID: LIB31-025-Q1-E1-C12
cactaaagtctatagtgagtcgtattacaatcacttctctttttgaaaaaaaattaggcagaagaggcaagtaattttttttgtattttgcattcttcaaaaaaaaattgtttcacccaaaactagagaaaacaaaaacaatagggaaaaaatctacttagtgaagaaagcaaacaagcatacacaagaatatcaaccccacactattgctccccagcaacgacgccagaaaagagcttgataatccccaagtgcaaggaatcatcgtagatatttccaaaggtggaagtgataagtatggagtgtcgaacccacaaggagctaaaggtaagataaaaattctctcaaatccaatctgccattgagacaactctatgtaaaccgaaagtttgctttc

SEQ ID NO: 11626 - DNA, 461 bp, Triticum aestivum
  Clone ID: LIB31-025-Q1-E1-C4
acgctgccagtgcggtctagaattcacgggtcgaccaccttgaatgatctgttttcactggatccagtttcatacgaacatcttttgcagttaaagcgttatgagggcaaactcttggatttggaattgcgtttcgttaccacaaataatgaaaatgctgaccaatctgaagaattgcttcctggtgggagaggaatgcgtgttactgatcataatgttactacttatattcatctaattgccaaccatcgtttaaactatcagatccgtagtcaaagtacacattttttgagaggttttcaacaactcataccaaaagaatggattgatatgttcaatgaacatgaagttcagtttctcatatccggctctccgaaaagtttggacattgatgacttgcggtcaaacaccaattatgctggaggatatcatgagggtcatcaggttattgatatgttctg

SEQ ID NO: 11627 - DNA, 440 bp, Triticum aestivum
  Clone ID: LIB31-025-Q1-E1-C5
tcgtgggccgacaccaatcgctatagtgagtcgtactacagggagatcctcaagctcgtgaaggagaactttgacttcaggcccgggatgatcagcatcaacctggacttgaagaaaggtggaaacaggttcatcaagactgctgcttatggtcactttggccgcgatgatgctgacttcacctgggaggtggtgaagcccctcaagttcgacaaggcatctgcctaagagcatggcattctcttggtctgccgcctctcaagttcgtcaagacgggatcatgttgctcctgggaagtgagaagaagcattagacattgaagcgacgctctacactggtcttgttgtatggtagtcagtgctaagtttcttactgtcatttcatatatttatcctttccattttgagtcgctgaaactgctgagtgatgtgcagtttgct

SEQ ID NO: 11628 - DNA, 320 bp, Triticum aestivum
  Clone ID: LIB31-025-Q1-E1-C6
tctaggactcgcgggtcgacacgatgccctaaactgagtcgacatatgaccccgaggtgaaatcgcttctgagcagcaccgccgatgtctggatgcccgtcatcaccgcgtctgctgatgaaaggcgagggtttgcggaaacaagtggcaacaagggagagcaagagaaatctaagtaaatagcttggactgaagcccttgtagtcctttgtgccagccttgttctacatgtttcttacatgagtatatgtccatagctatgtatcaaatgttcttttttggggggataacagaaaataatcacacatgttgttcatgta

SEQ ID NO: 11629 - DNA, 442 bp, Triticum aestivum
  Clone ID: LIB31-025-Q1-E1-C7
attcccgggtcgacggcgacgcagtaatcggcgacccttacgcaatagcattgtatttggaggacaagtaccctcagcgccctcttttgccccaagaccttaaaaagaaggccctgaatatccagatagcaagcattgtgtgttctggtattcaacctcttcacaatctcaccttggtgagatttatcgagcaaaaagttggaacaggggagagcatcccgtgggtcaaacaacagattgatagaggtttcacagctgttgagaacatgatcaaaggctgtgctgggaagtttgctatgggagatgaagtccaactggcagatgtattccttgcaccccagatttttgctgcggtgactcgttatcaaatcgacatgtcgaactatcgcaccctcgcgaggctctacgatcaatatatgacacaccctgcatttgaagctgc

SEQ ID NO: 11630 - DNA, 389 bp, Triticum aestivum
  Clone ID: LIB31-025-Q1-E1-C8
gtctagaactcccgggtcgacgaaatattcaactatccgtcgcaaaatccagaaccaccaggtccaatctagacaccatctcggatggggttcaacacctccattggtgcctctctgatgatgtgtgagtagttctttgtagacctttggatccgtagttagtagctatatggcttcatctctctctctctcttgagtctcaatacaatggtctcttggagatccatatgatgtaactctttttcggtgtgtttgttgggatctgatgaactttgagtttatgatcagtcatatctttttatatccatgaaagttatttgagtttcgttgatctcttatatgcatgatctcttatagcctcgtatttcttccccgacatatgggttctg

SEQ ID NO: 11631 - DNA, 446 bp, Triticum aestivum
  Clone ID: LIB31-025-Q1-E1-C9
ggtcgagaattcgcgggtagacgaggtggcccagaggccacacatccatgcacgccaccggattaatcatcactctcaggatttttggagttacagaataattgaaacctacaaagtactacagactgttctgtttttgacagattctgtttttcgtgtgttgtttacttattttgatgaatctatggctagtatgggggggtatgaaatatagagaagttggaatacagtaggtttaaaaccaatataaataaagaatgagttcattacagtaccttaaagtggtggtttgttttcttatactaacgtggctcatgaggtttctattttgagttttgtgttgtgaagttttcaagttttgggtgaattcttttgatggatcatggaacaaggagtggcaagagcctaatcttgggttatcccatgggtcccccaatataatccaa

SEQ ID NO: 11632 - DNA, 428 bp, Triticum aestivum
  Clone ID: LIB31-025-Q1-E1-D2
ggtctagaattcacgggtcgacaaagggtaagtgttgaaagatgtccgcaacggtaaactccattacgggagcccaacctggcgcgactggctcgagagtgagcggaccaggaccaacagccggatatgagtccgggggtccgggaatacaggcctccacagcggtgggacccgtgttcggctctaccaccgataagtgtgcggcctgcggcgtggggtccggccctccgtccataggcaacgcaacctgccctggatttagttccaaggctgcttcggggatgatgtcctgggcactgtccgatagcaggtctaggtcgtgcttgtcgtggctgtccgacgctcctggcgtaggctcgaatccttcgaacatcaagtctccgcggatatccgccgtgtagttcaagtttccgaacctgatctagtgg

SEQ ID NO: 11633 - DNA, 417 bp, Triticum aestivum
  Clone ID: LIB31-025-Q1-E1-E11
ggtgtagaattcacgggtagacttccacgacagcgatatccatcatctcatcgaaagacgggacacctttgcctctatcacaagctctgaggctccagcatgcatatatatagtagagagagtgtgaagagtgcaaaccctagaaaacaagcatcggggctgcagtgtatatagatggagtggttttatttttatctccataaaaatcgttttaaattgtgcaagaaatggaactctttatttaacgtagtgaagaaaaatgctaggggcaatgctaataagtgaagaaaatttaacgctctaaggagtcagctcgcaattaacagtgcacgcctcccggtcgcgcttactaatgttcacgtgtggtacacgaccctccgaagtgaacaacaattgaaacacacacggtcaaaatat

SEQ ID NO: 11634 - DNA, 460 bp, Triticum aestivum
  Clone ID: LIB31-025-Q1-E1-E7
gccgccaggtaacggtctagaattcccgggtcgacatgtgtaagggagtgcagtatctgaatgaaatcaaggactctgttgtggctgggttccagtgggcatcgaaagaaggtgctttggctgaggagaacatgcgtggcatctgctttgaggtctgtgatgttgttctgcacactgatgctattcacaggggtggtggccaggtcatcccaacagccaggagggtcatttatgcttctcagctcactgctaagccaaggctgctggagcctgtgtacctggttgagatccaggccccggagaatgcacttggcggtatctatggtgttctgaatcagaagagagggcacgtgtttgaggagatgcagaggcctggtaccccgctgtacaacatcaaggcttacctcccggtcatcgagtcgttcgggttctcaagtaccctcagggctgcgacatctgg

SEQ ID NO: 11635 - DNA, 445 bp, Triticum aestivum
  Clone ID: LIB31-025-Q1-E1-E8
caggtacaggtctggaattcccgggtcgacagaagggggaaaaggaagacaggcaagagctcaagcttggggattcccgaggcaatccaagtaaatattcaaggagactcaagcatctaagcttggggataccccagaaggcatcccctctttcttcaacaagtatcggtatgttttcggattcgtttcgttcatgcgatatgtgcaagtcttggagcgtcttttgcatttagtttttacttttctttcatgcaccatgatggtatgagatagttcttggtttatttatagaatgatcattgcacttcacttaaatattttgagtatggctttatagaatgcttcatgtgcttcacttatatcatttgaagtttggattgcctgtttctcttcacatagaaaaccgccatttgtagaatgctcttttgcttcacttatatttgtt

SEQ ID NO: 11636 - DNA, 258 bp, Triticum aestivum
  Clone ID: LIB31-025-Q1-E1-F1
cggggagaaggaagagccggtgaagaaggaggctgagtcccagatcgccaggaaggcctagagaaggaagctctacataacctatccccctattcgttagagcagcttgtagcatctggtttggctgagtggaaattttggcctgttatctgtcgtctaaatactgctagctcagactttgtgaaacctttgatgatgtctcatgtactggattcaatctggttgtgttttggaatatttttcatcgcatgagttttc

SEQ ID NO: 11637 - DNA, 432 bp, Triticum aestivum
  Clone ID: LIB31-025-Q1-E1-F3
ggtctagaactcacgggtcgacaaggccactcataatgcatcttgaaaccatgcaggagtcagctgctcgaagggaagaagcttgggctggtgtggagagaaccttgaactctcgccttcaggaagcggaggcgaaagctgctgcctcagaagaaaaggagcgatctataaatgagagactgtcacaaaatttatcccgcataactgtcctggagacccagattacaattcttaggacagaacagacacagctgagccgatctcttgaaaaggagagacaaagagcatctgaaagtagacaggagtacctagcaaataaggaggaggcggcattacaagaaggacgcgccaaacaacttgaagaagaaataaaggagcttagagccaggcacaaaaaggagctgcaagaagcagcagaacacatggggctgc

SEQ ID NO: 11638 - DNA, 444 bp, Triticum aestivum
  Clone ID: LIB31-025-Q1-E1-F5
ggtctagaattcccgggtcgacattatgcatgggcttgaatcccagacaatcgaatccctgaatctcttgaaaagtcgagatgcagtatttatcgttgctttgaacaaggttgatcgtctttatggttggaagacctgccccaatgctcctatcgggaaagccttgagacaacaaaatgatgacgtcaagttggagttcaatacgaggcttactgatattgtgacacaattcaagatgcaaggtgtgaacactgctttgtactacaagaacaaagagatggaagatacatttaacattgtgcctaccagtgcagtaagtggtgaaggcattcctgatctgcttctactattggtgcaatgggcacaaaagacgatggaagaaaagcttacttttgttgatgaagtccagtgtactgtcctggaagtcaggtcatcgaaggtcat

SEQ ID NO: 11639 - DNA, 450 bp, Triticum aestivum
  Clone ID: LIB31-025-Q1-E1-F6
taacggtctagaattcccgggtcgacgggcagcacgcagactgcggtggagctatgatcagcaaattgtcgaacaccacatggcccaaaggggccttcatggagacaatgaaggtctggcaacaagagtggttctacatcaccgagccgcgccgcactaagtgggcagcgattccggagttcagattcggaccccccatgaggctcacctcctggaatgcgaagggccatgactgggggtcccagatggaggtgcatgagctgcaaatgtgcatcactaacatgctggggaagaacgttggtctatccaacgtggttcagatcaagctcttccgctgcattctcccctaccagcgccgggcctcccccatgtgggaattcaaaccggagggaccccgggcgttgccccacttcctctgcaccatgaacgagtcatgaggacatcaatacc

SEQ ID NO: 11640 - DNA, 415 bp, Triticum aestivum
  Clone ID: LIB31-025-Q1-E1-F7
ggtctagaattcccgggccgacgagcagtggaagcgcgacaccctccccgccgacgatatccccgtgccgccggcgatggccgtgaagaccgaggacaccgaggacccagcgcccgcaagaattatttcataccacacagatcaggaaagccagccagcacaaggggacgtatggagggattttgccttggagaatatctaactgcttatgatctagtacaagtgcttcaagggatcaagattctgctggaattctacgagctgcacggcggactctggcctttgtagatatttcttaaatccagtggatgaactagtgtactgtatctggttgaactgtactgtgtcatggcaatatgtatatgctccagatattggcagcatgatggtattgaacatcgtcagaaactagatt

SEQ ID NO: 11641 - DNA, 435 bp, Triticum aestivum
  Clone ID: LIB31-025-Q1-E1-G1
gggtcgacagtcggggtggcactcgggtgcatgctcgccttgacagtcatcaaggtcgcaatagagtcggtggaggctgtgctcggcgacgctgagagagagtctatcaagcataagtccatgctgttgtggctgaagcgacttatggatgccgacatgcttgaagattttgaagatgaaaccgacctcaacctggtatggattctgtcgatttggtcactatcaatgttgatatgaatgattttgtttaataacatattaatatttttagataatgaactacatctaaaactttttttatgtagtgaagtagatctgaacctcgctgttggagttgatctttgagtcgatgttaagtaaaagttacatctacttgttgatgccaagaccgccatttcgttcctaaatgtcgctgccttcttatgtttcaccaat

SEQ ID NO: 11642 - DNA, 454 bp, Triticum aestivum
  Clone ID: LIB31-025-Q1-E1-G4
ggtctagaattcacgggtcgacaagattttatctagtctggatagggacaacaaattgaagaatggaatggagtatgaagacagtgaagaacagcatgctcagctgagcactactgaccgcacttttctggcaaaggatcttccagggcaattgtcatcgaaggctcaagctttagttgaagcactggagggaaagcggtttgactcatttatggacgccttaagagatacagcagaggaaagtggcttgttatttaagaagcttgataaaagacttgagcgatcaatgctgcattcctaccgcaaggatttgatagcacaagtttcttcagagactgatccagtttccttcctcccaaaagtcgttgctctactttttctccaggcacacaacaagggtcttcaggcacctggaagggctgttggtgctgtcatcacactactgaaggacaag

SEQ ID NO: 11643 - DNA, 447 bp, Triticum aestivum
  Clone ID: LIB31-025-Q1-E1-G5
gtaaggtctagaattcccgggtcgaccggccatgatggaatggatctctgtcgaatgcgctccgatgaatgctcgcggagggaagatggtgaggttcagatctaaatccccgtctcttttataggtagctcatttgcgcagctaggggggtaaatgaaaaaacaccctggcttttcgcattcgtttgacacgtggaggacgactattattggtcacagaagccgaggagcacaacattcaccagaagccagacactattcaacaggtatatggagtttggagaagaacccgccttgcaatgccgaagacaaatctgcgcgccggactcatcgtcattgatgcctggttcgggggctactgagggagtcccggattagggggtgtccggatagccggactataacctttggccggactcctggactatgagaatacaagattgaagac

SEQ ID NO: 11644 - DNA, 399 bp, Triticum aestivum
  Clone ID: LIB31-025-Q1-E1-G7
gcgggtcgacgtcatacgttacattgagatcaaatagtaaatgagaggcatgaagatacaggggagagtggtttgccccagaggagtgttcaaagcctcttcttctgagaataaatttttgtatggaattatgtcagctaaaaaccttttattggatgtatcctgatggttggtcacattttggtggtattatgtacttgcttgaactaaatcatgagtcattttcaaaaaaaagaaaaagagaaatagaatatggaacaaggaaataaagctatgcatgtgaacaaaagaaatggacactaagaaggcacaaatgagtgagcgtatgaaagcaaaaaagcgggcgctcaaaaggatcaaagcttacttacgcgtgaagggaagttcaaacctcttcta

SEQ ID NO: 11645 - DNA, 454 bp, Triticum aestivum
  Clone ID: LIB31-025-Q1-E1-G8
aggcacaggtctagaactcgcgggtcgacaagtcgagttacaagaaagcttcgtgaactccaactcatcctcctactacaagcaacttcaagccgagagctttatcatcatccacaccaaccgatgagaccgtcaagacaagttccttcaaatgcttcacatgcagaggccgaggccacgagtcctatgagtgcaccaacaagcggaccatgatactcaatgacgacggaacctacgactccatgagtgaaggagaaatggacggtcttgagcaagtcgccatgcactggcaagtgaactatgaagaggaacaagtcttttgtgatgaagattcaagtctcgctcttgttgtctccaaggtattgactctccaacataaccaagaagaagaccaaaaatgccacatattccacaccaaagccggcatcactgtaagatccgtcaaggtcatcat

SEQ ID NO: 11646 - DNA, 348 bp, Triticum aestivum
  Clone ID: LIB31-025-Q1-E1-G9
cgcctgcaggttccggtcgcgaattcccgggtagaccgctttgtcttttttttttttaattttttttttcggaggatctcatgaacaactaaatcacgacataatgaacatgtagcctcacgtactagtaactcataagcaaacgatattccaaagctaatggggtggacgcttcagttagcatctaaaccagcacttttttcccagttccgagtccacaggaccagtacggcaaagggcgcaaaaaaagagccatctacatatcattcctatagttaggcaagaaatgaaaccatcattttttatggatttcactcccattatggaaccacacagatgtatgatgct

SEQ ID NO: 11647 - DNA, 437 bp, Triticum aestivum
  Clone ID: LIB31-025-Q1-E1-H1
ggtccaggattcacgggtcgacttttccactaacaaccccatcataaccacaactctgccttacgtaaagttgccagagtacgattaacctctggatttgaaatcactgcttatatacctggtattggccataatttacaagaacattctgtagtattagtaagaggaggaagggttaaggatttacccggtgtgagatatcgcattattcgaggaaccctagatgctgtcgcagtaaagaatcgtcaacaagggcgttctaaatatggggtcaaaaagccaaaaaaataagtgattttagcccttataaaaagaaaacggattcttgaacctctttcacgctcatgtcacgtcgaggtactgcagaaaaaagaactgcaaaatccgatccaatttttcgtaatcgattagttaacatggtggttaaccgtattatg

SEQ ID NO: 11648 - DNA, 448 bp, Triticum aestivum
  Clone ID: LIB31-025-Q1-E1-H2
ccggtctagaattcacgggtcgacatcgagccagatgcgcatgtcaagcaggcgatgaatgagattaatgcagctgcaaggatgagggtggctgcaaacgagaaggcggaggctgagaagattgtccagatcaagcgtgccgagggtgaagcagaggccaagtacctgtctggcctgggtatcgcccgccagcgccaggccattgtggatggcctgagggacagcgtcctgggcttctcagtcaatgtgcctggcaccactgcaaaggacgtgatggacatggtgctgatcacccagtactttgacactatgaaagaggttggcgcgtcctccaagtcctcggcggtgttcatcccccatggccctggcgcggtgcgcgacatcgccacgcagatccgcgacggtcttcttcagggccagtctgcctctgacaactaagcactttgct

SEQ ID NO: 11649 - DNA, 418 bp, Triticum aestivum
  Clone ID: LIB31-025-Q1-E1-H6
ggtccggaattcccgggtcgactggacatataccccggaggatcatattttacagggatgttgtcagcaaaggacggctcaatatggttattgagcatgaactttctgccattaaaaaggcatgtgcgtcgctggatcctatttataatccacaagttaccattattatggttcagaaacagcaccacacacgtttgttcgctggtaactatggtgttgggagcacaatttttgaaagtggaaatgtattgccaggtactgtggttgataaagaaatatgccatcccactgactttgatttttacttgtgtagccatgctggcactaagggagtcagccggcctgttcgttatcatgttctctgggacgagaacaattttacgggcaacgctttgctaattctcactaaccatctatg

SEQ ID NO: 11650 - DNA, 456 bp, Triticum aestivum
  Clone ID: LIB31-025-Q1-E1-H7
ccgccaggtacacggtctagaattcccgggtcgacaccaccggcgccggcgacgccttcgtcggctccctcctcgtcagcgtctccaaggacgactccatcttctacaatgaggcgaagctgaggggggtgctgcacttctcgaacgcttgcggcgccatctgcaccaccaagaagggagccatcccggcgctgcccaccaccgccaccgccctggagctcatcagcaagggcagcaactagagacgccttgtgtcgcgccgtcgggtctgaatcttaggggagtttagctgcacttttattattagggatgaattgagtttagttcgtgtgtgtcagtgtgtgacctcgtgggcgcttaataaaaagcaagcatgtgtggtgattttggttgccgtctttgtgtaaggaagctactgattgttgtagccttcacccaaactttatcagagtcttg

SEQ ID NO: 11651 - DNA, 450 bp, Triticum aestivum
  unsure at all n locations
  Clone ID: LIB31-026-Q1-E1-A1
taccggtccaaatatcncgggtcgaccaggctgagaaaatgggacttgactacatggatgttgaaagtctcaagaagatgaacaagaacaagaagcttgttaagaagctagccaagaagtaccatgctttcttggcatcagaggccataatcaagcagatccctcgtctccttggccctggtcttaacaaggcaggcaagtttcccactctggttagtcaccaggaatctcttgaagccaaggtcaacgagacaaaagctacagtcaagttccagctaaagaaggttctttgcatgggcgttgctgtgggcaacttgtcgatggacgagaagcagatccaacaaaacatccaaatgagtgtcaacttccttgtgtcnctcctgaagaagaattggcagaatgtgaggtgcctgtacgtgaagagcaccatggggaagcgtgtacgggtgt

SEQ ID NO: 11652 - DNA, 465 bp, Triticum aestivum
  unsure at all n locations
  Clone ID: LIB31-026-Q1-E1-A12
cgcctgctagtaccggccctgaattcncgaggtcgacccgaggctcgtgggcccaagacccgtggaccggaggctcgtggaccggagtccgtgtagcctcctcctcggacgagtccaccctagcagtcacgtgctcgggtgaaacagctgggggtggcggcgaggaaggcgccgtagcagtcaccctacctcctctcccgcgaccacgtgccccacctcctctcttcctacctcgtcccctgctgggcaccgcggtcgacgaggaagggcccggcggtgtggccatactgtccagcaacgctcggcggagaggtgcgtctggaatggaagacctcagaccacgagccgacgaagaaggggccttggcgcgctcccgaccagagcccaccatctttcaacacctgccatgacaaacagtaaacgaaattagtacaacatagataaaggacgacatgaataataata

SEQ ID NO: 11653 - DNA, 382 bp, Triticum aestivum
  Clone ID: LIB31-026-Q1-E1-A6
gcctgccagtaccggtccgagcttcccgggtgcgccacagagttaattacttttgttgaatctgatcctttccatggttatgaaactgaaactgttgtggcacatcttactaagtcgaatggcatatcgacccttttcactcatgatgagaagactcactattactttattctcaaattatttcctttctcattaaagggtgatgctaaagcttggtacaatactcttgctcctggttgtgcgcgtagtcccgaggatacgatttaatacttctctgaaaaatatttttttggtcaaaagaaagtagctgccttacaaggaatatttaactttgtgcaaattaaagaggagagtctcccacaagcttgggggaggctttgcc

SEQ ID NO: 11654 - DNA, 468 bp, Triticum aestivum
  Clone ID: LIB31-026-Q1-E1-A8
taccggtccgagactcccgggtcgcacacagctcccgagagggccactcatttctttgtacacgagttcatccaccatccactcctcggcaaccttcagactggtcatctcttggtagatttcttccggcgagagcttctgcagaactgccatccccgtaaaccatgagctgtaaccagcattgaagtagtatgtgcatttcacgcttaatacttcattcacacagtcaaagagcagcctccgaatcattccgaaagattttccctcttcttcacccactggcagcctaaaattgccatttagttcttcaaacagatgtggatccaggatatttgagctatcaaatcgctcgaagtaagagcaagcattatctctgagagatatagcattcagtatttctcgtaagaactttagctccatacgacatgagctgctgctttctgatggacgtgttgtttcggctaaagt

SEQ ID NO: 11655 - DNA, 388 bp, Triticum aestivum
  unsure at all n locations
  Clone ID: LIB31-026-Q1-E1-A9
gcctgcccgtaccggtccaaaattcncgggtccacctgaacgcaaacacagtcaagatcaaggctgccgtgaaaaagatgtacgacatccaggccaagaacgttaacaccctgatcaggcctgatggcaagaaaaaggcgtacgtgaagctgacaccagactatgatgctcttgacgtggccaacaagatcggcatcatataagtcagagggacggtcctgcaataagcgcttgtgtcgtggtttcttatgttattggagttttgtagttgtgacttagcaaacgggctcagtggctccattgcctaccatatcgccgcgcactttcatgaatttgatgcaatcgaagtgacttgtgttgatgctaatttgagctttgcgtttggtgc

SEQ ID NO: 11656 - DNA, 395 bp, Triticum aestivum
  Clone ID: LIB31-026-Q1-E1-B10
actcccgaggtcgacccgatgcgataacatgagtcacagggtcgtcgggatgttgtcggcggtgtcgcacgccatcagagcgctgccaactaagtgtgtgcgaccgcagaccagagagagagcgaggggacatgaccgtgagatgtggagagagatcatcccatgcgtggtcgacgcaggtccaaagggcaacttacggatgtcctcacaagtcccacatggcaggggcaaaaaagcgagtggatactagacagtggcataccatcacagagaatgtcagtaatggcccattgttgaagtgcattactaccaagtgagcacattgccaatagttggggtgaaccggtcgttccaaagaacaggcgcactagaggatctaagcttacgtcagcgtg

SEQ ID NO: 11657 - DNA, 389 bp, Triticum aestivum
  Clone ID: LIB31-026-Q1-E1-B3
gggacgacaacctctacatttcagacattccaggtgaaccaagcccaaaagcagaggcgccgtacataccgtgctcacggacgcatcaatccttacatgtccaacccctgccacattgagctgatcttgtcagagaaggaagagcctgtgaagaaggaggctgataacgtcttcgcaccaaggaaagctatctaagctaccggaatggatgcattcgtccaacagtcttagttgtagttcttctcaagtacctttgttggcactgtatgttgcctcccttgatgtctttgttaccaacattgattaaggatttgttaacgttgatgctatccttgtgattgccagtggtctttatatgctaaaacagtttcagatatttgagcattagc

SEQ ID NO: 11658 - DNA, 473 bp, Triticum aestivum
  Clone ID: LIB31-026-Q1-E1-B5
taccggtccagaattcgcgggtcgacacgcaaacggtgcacaaccagccccatgggtagaccttgcatgtctgatggtttccatgcaaagatgtcccagttctcacgaaggaactggatgagcgcgacttcctatttgctagcgagtgtcgttgagatgtgcgtcggagcagcggtggggtcctccgggtgaatgtggactggcttcgtcgcgcgtgccgactggaatgcggattctgaagcatgcttcttagctcgcaaaaaatcactcggatcggcatttttcttgtattcctctatctcgaatgctgccatttgctcatcggcaatttttgagcctttttgaaggcactcctctgctctctgcctatttcccgtgactgtgatcacacctctggctccggccatcttcaacttgagatacacgtaacatggtcgggccgtgaaatgagaatatgcgggcctgcccagaat

SEQ ID NO: 11659 - DNA, 426 bp, Triticum aestivum
  Clone ID: LIB31-026-Q1-E1-B6
tcgtggttcgacacaactccctatactgagtcgtattagtatttatatagcaaagaggcggtgcgggaggccactgatgtgggcacaaaccagatgggcgcgcctggttccccaggtcccccatgatgagttgtgcacaccactgggtccgtcttgaatactttcgtagatgcacaagtcatcgtccggtcaaaagtgtgtgtaagctagattactatactacttcatgcagtttcacatgtatatcattggagtgttatgtcattcattttgcatcgtatgatttcttgaactatgtgagaagtgtcctctttctttcctcatatatagtctccagctccaagcagctttactttcagatacattcatagatgaccatcaatacaacgtcatagctcttcgacattttcttataaaaaacgttca

SEQ ID NO: 11660 - DNA, 284 bp, Triticum aestivum
  Clone ID: LIB31-026-Q1-E1-B8
tactgagactcgtagttcatcataacaccctatagtgagtcgtattacggagttgtcttcaacgtcttcgagcatcttgcatctggactcctacgcagatgggcctctctaatatctgtcttctctgttattcaaatctcctccgatcatcaggttgtcaatctacgacccagggacgtcccaatcatacggatagatcaccaaagccacatgtctctgagactttggataggcatttaccgacatctgcattattaagactgccgttacctcctcatcacgat

SEQ ID NO: 11661 - DNA, 400 bp, Triticum aestivum
  Clone ID: LIB31-026-Q1-E1-C10
gtcgacggaggtccgtacactcgatcgaaagagacggaggacatactctagcgatgcttgctaccttgtggggcgacactatttgtctcacgcatacagggctagtttggatcgagtcctcgacattgtgcctggaggaaagtgctgcctggagcctggggtggtggaccttttttgcctggccaggcaaacctgggcatgtatgtatggttccatccctgggtggcgtttttgccaattagtgactaaagaacttttacacgatggaccatactgcacatgactcttgaaagtgccaggcaactggccaagcgaatgacacatgacgcctgagtcacgcgattatcatgagacattcatcattgtcaaaaaggcggccgctcttgaggatccaggctta

SEQ ID NO: 11662 - DNA, 493 bp, Triticum aestivum
  Clone ID: LIB31-026-Q1-E1-C2
ctggtacgcctggcggtaccggtgccaaattcgcgggacgacgagaaggttcagtggatgcacatcgacatggcggggccggtgtggaacgacaagaagcgtgccgccacgggattcggcgtgtccaccctggtggagtgggtgctcaagaactcatcatcctgaatggacatcccccctgatttccattggttctgataacaacgccagagaaggaagataaacagagtgctgttcattcatgattgtaccagggaaaatgaatggattttatttgcttttggctggcgtatggactatggatgggagctatagaattaggaacggtttcatggaggaaaatagaacagaatcagaatgtcgttgaacacatcccttgtcagattatatggtgtttcatcgttttcatgttgtgcctgtgactggctcgtgttgtctaattatgtcgtgtccttttggctcatgttgaatatgctaatgcaatggtgctttt

SEQ ID NO: 11663 - DNA, 478 bp, Triticum aestivum
  Clone ID: LIB31-026-Q1-E1-C6
acgcctgccggtaccggtccaaaattcccgggtcgacaacggcaaccgtcccaacatcaccggtgaaaagacatcgcgccaatggagctacccctacggctcctatctcaactctcattattctacgtctcctgttttgaccgggcgcttctccaactacaggatgcaatcagattttatagcaaggatgttgggtctccatgaagcccctccagcgtacgagctcacagaagatcaatcttgtgactcatctggcatgacctttgcttctggtggcgctggtgtcttcaaggtgaagaccaagaaggtgccgacacttgccgcacaagttcaaactttcaagaggcttgtcaaggatggggtcatctcaacacatcagcttcaccactccgtcgcgctcatcgccatctccggcaatgattacatgagcgactccgacattgagactggcttctacacaagcttcgatgatcttgat

SEQ ID NO: 11664 - DNA, 201 bp, Triticum aestivum
  Clone ID: LIB31-026-Q1-E1-C7
caggtccaagactcgcgggtccacggtaatcgctataatgagtcgtattatcacagaaatctaccacaccgagcaaccgactgcatgtctccggaccaatgtgtttcagcagacccatcatacccgcagtgattcctcccagattcaagtcgggtactggagtcagcaagttcaatcgtcattctaaccccaatgttctgg

SEQ ID NO: 11665 - DNA, 250 bp, Triticum aestivum
  Clone ID: LIB31-026-Q1-E1-C9
ctatagtgagtcatattatatctcgcatagacgcgtcctctggctgaacagcagtacccgtatgctccggcaagccaacaatggatcggccaaactaccacataagcaaccggagacgctagcttggcagatgaaggtgcatttctcaaatgagtggtgactcgcgagctgtgggtcactgtaactcgccggcatgaatcgacgtctccgttgacggccgccttttttttaaaatttgctgaaaatcttt

SEQ ID NO: 11666 - DNA, 273 bp, Triticum aestivum
  Clone ID: LIB31-026-Q1-E1-D10
ggaagagccagaggagtggaggaggcttgagcaggagcctcaaggagcacagggccaggctctacatcatccagcgctgcgtcgtcatgctcctccgctggcacgactgatcgactccctcgctccatggatggatccgtccttccattccatggatggtgtttgaagcaaagatatactttttggttttgggtctgtgattgtgctgtgccacaatggtgtcggcacgtagtacttgtacataagaggcgagtcaaattatagaagtagaag

SEQ ID NO: 11667 - DNA, 448 bp, Triticum aestivum
  unsure at all n locations
  Clone ID: LIB31-026-Q1-E1-D2
ccggtgcgagattcncgggacgacttccaccaaagcgaaatccaccatctcatcgaaagacgggacacctccgcctctatcaagcggtatcagatttccaggttgctcggtgagattttacagtttttcgtagtttagatcgagtctgttcttcatatctacagtccacgaaaaagccacaaaaaaaatttagggttagttcatcatatccgaaccaatctgagcctttgcataatctttttagggtttttgctttgttgaatttgcggttgcatcgtcggtctagttgctggtcttaaagtctaatcttttagagtttcgagttctggtcataagttgtcacgccgccgccacaccatcatcatcgcccctgccatctaccaccaccgctcatccggcaccgctccgaattcgtatccatataccaccaccaatccgtgtccatata

SEQ ID NO: 11668 - DNA, 459 bp, Triticum aestivum
  Clone ID: LIB31-026-Q1-E1-D5
cgcctgtcaataccggtccgagattcccgggtcgcacgtggtacgtcaaacctaatattgttgtctgcggctgatggagggggccaagttcttgtttataaaattttgttcaaaattttaaaaaaaatactgctgtgtttgcaaattgtggtcatgaattcaaaaaaaggttcttgttgtttcaaaattccttgctttttggaaaaaaaaatcgtaaactgcaaaaaatgtatgtgtttataatttttttcaatttttttaaaaatgttcatcttttcaattttgtccataaattcaataaatgtcaggaacatttcaaaatgtacgcacatttcaaaagtgttcaaaagttaaagaaatttcaagttttctattgtcagtcacaaattagaaaatgtttcatgatttccaaaatattagaattttcaatttgtatttgcttttttaaaaactatttgc

SEQ ID NO: 11669 - DNA, 389 bp, Triticum aestivum
  Clone ID: LIB31-026-Q1-E1-D7
taccggtccgagattcgcgggtccactcggtgcttgtgtatcccacgggctttcagcaagagaatgtggtgaccggcaagatctcagccatgcgatcgtcgtcgtagttgtactggtggtgcttgcactgctagagttgtagaggaacgcagcttgcagcccaatcctattatcaagttgggctctggtatgcaacggatgaaacgtctgtgtcaagaactgttgtctcagggtctgtgtggtcagctacgtccgatagtggtttgtgtgtcgtccattcttcccatgggtaattttttttcgcaccctggtgctaaattagaccttgatgctgcggatgaaaccggttgtgctgaaatgagatcagacgttttgtttccgataacagc

SEQ ID NO: 11670 - DNA, 453 bp, Triticum aestivum
  Clone ID: LIB31-026-Q1-E1-D8
ctcgcgggtcgcacagtatgccctatattgagtcgtacaatccagtgaagaccacttacaccagtgctaagttggcaaagatatacatgaccaagatcgtatgtttgcatggagttccgaggaccattgtatccgacagaggaagccagctttacctcgaggttttggcagcagttacatgaaacattgggaaccacgctagaatttattacagcttttcacccacagacagatggacagagcgagagagtcaaccagattctggaggacatgttgagagcttgtgcactagattatggatctagttgggatgacaatttgccgtatgcggagttttcttataacatcagttatcaaaccagtttgaagatggcccctttcgaagctttgtacggaaggatgtgtagaacaccgttgttatgggacgaagttggagaccgtcagttgtttgga

SEQ ID NO: 11671 - DNA, 451 bp, Triticum aestivum
  Clone ID: LIB31-026-Q1-E1-E1
ggtacgcctggcggtaccggtgccgaaattccgggacgaccatggcgtcctccaactccggcggcatccccatcaaggcggaacaggattcggaaggctcggcccagagcacagctgatatgactgcttttgtgcaaaatcttctagttcagatgcaaaccaggttccaaactatgtcagagaacatcattacaaagatagatgaaatgggtgcaagaatcgatgaattggagctgagcatcaatgacctcaaggctgaaatgggcagcgatggtatgacccctactaaagtgaaggacgaagaatcaaagccagcagacagctctgcctgatttaagcagaagtagcagaagcaagtcgtattagtcttggttccatgtcaatatcatcagccattcatcactaacttaatgcatgttatgagatgttattcgcactgttatatgcattt

SEQ ID NO: 11672 - DNA, 394 bp, Triticum aestivum
  Clone ID: LIB31-026-Q1-E1-E11
ttcccgagtccaccaagacccagaagagcactggcccaagggggtttaaataatatgaccatcgggctccggaaacccaagggaaaaagaggctacgtggcaaatggtaaaaccaaagttgggcattgctggaggagttttattcaaggcgaactgtcaaggggttcccattatcacccaaccgcataaggaacgcaaaatccaggaacataacaccgatatgaccgaaactaaggtggcaagagtggaacaaaacactatgaaaaaaagccgagccttccaccctttaccaagtatatagatgcattatgataacaagctaatataatgatatcccatacaacacccaaagccctgaaaaaaaaaagcggccgctctaaaggattcaacctta

SEQ ID NO: 11673 - DNA, 407 bp, Triticum aestivum
  unsure at all n locations
  Clone ID: LIB31-026-Q1-E1-E3
cgcctgcccgtaccggtgcgatattcncgggacgacgacggttgccggggattttcgtgggcagtgactccggaagatgatcgtgttccactgcctggtatccagaagcaagggatggacacgcaagacagaccgagtgcaccgcgttttatagatcgtcacatccaccggattcccccatgactgagactccaatcgcagaagcctacagacagggatatgtcatgacattgccccaagttggataatggtagtactgtgaatgccgcattcagcagcccgcaccaatgtgatattcgtgtccaatcgcctgtccaaataaggggagatccctagtctcacggttccaacaatgtgcaaaaagcaccacacctgtgggaacatgtaccgctgtaaatgcacagcaa

SEQ ID NO: 11674 - DNA, 427 bp, Triticum aestivum
  Clone ID: LIB31-026-Q1-E1-E6
ggtccaaaattcccgggtcgacgagattttcattctggggcccgtatttctacacaatatgtatccctttgagatgttcatgggagttctaaataaatatgttcgtaatcgctctacgtcagattgaagcatctccatgggccataaaatagaatatatcatcgggttttgtgttgacttcattcctggccttaaaaatataggtctccctaaatcgcggtatgaggtaagactgactggaaaatgcacacttggaatggactcaataatatgcacggacggatattcttggtctcaagcacactacacagttctacaaaactctaccttggtgatcccatatgtcgatgaacacaacaatagtctgcgctccaaacacttggagcagtgcgacgactggattacatgtgaacacatcatgactttc

SEQ ID NO: 11675 - DNA, 448 bp, Triticum aestivum
  Clone ID: LIB31-026-Q1-E1-E8
attcccgggtccacgttgttgaccagaacagggcacttgttgatgctccggacatggtccgctgccagatgaacttaaagcggctctctctgaccgacatcaagattgacatcaagcggatccctaagaaggcaactttgatcaaagctatggaggaagctgatgtgaagaccaagtgggaaaacagctcatggggcaagaagctgattgtccagaagaagagggctgcgctcaatgacttcgacaggttcaaggtcatgcttgccaagatcaagaggggaggagctatcaggcaggagctagcgaagcttaagaaggaggttgctgctgcttagatcactttggcgggcagactgttgagcttttggtcagagttgtatctttgccccaaaatcgtgaaatattgtgcgaatcactcatcactgttattggtgtatcagatgaaaat

SEQ ID NO: 11676 - DNA, 477 bp, Triticum aestivum
  Clone ID: LIB31-026-Q1-E1-F5
cgcctgtcgataccggtccaaaattcccgggtccactgagacctagccacactgttagttgtaatattttcgataactcaaactgaaaaatgttcgcagtactaatatgatttagtgaatttgattattatatatagttaggagatatttaatgatatgcgtacatcgaagagtggtaagggtctttggccgggtgcttcttctgctatatattcagctctctcagcgaggtgcgaggttccccgagtggaactcccgagaaatggttcaaaacggccgcaggagggtgcttgtctcctctttccgtggacgaggacatctcctgtatcccagtacacatgacgaacatgaggaggcggcgatcgcaccggcggcgagtttctagcgctgcaaactgcaagtgagcctccgaatccaccttttagtttatcctcctctcatgagcagatgcatggactatggtgacgctgcttatgt

SEQ ID NO: 11677 - DNA, 457 bp, Triticum aestivum
  unsure at all n locations
  Clone ID: LIB31-026-Q1-E1-F6
cggtccaaaattcccgggtcgacctgcagctagaggaggccccgacctgcagcaggccgtgcgcaccactcgacgctcaggatgtccaagttcttgccactcatgtcgtttaactctgtcgtgctcctcatgaatgaccctgctcacgaaccccctgagacccccctcattttgcaggagcttgccactctaaaacaaactctacaccgtttccattcttcaggagttcaggtacctaggctgctgactatgaaaacccgctcgtgctaattagtattattaaactataattttcttgtaaagtggaaaatgctcatgccccttggacgttggccatgggattttttatgttgtgttcctcccgtccgtccatgattcgaaatgtgttctgaacacttatgttagaacaaaaactgtagtgttcctcacgttcgtccttgattcanaatgtgttgtg

SEQ ID NO: 11678 - DNA, 455 bp, Triticum aestivum
  Clone ID: LIB31-026-Q1-E1-F7
cggtccaaaattcccgggtcgacctagaatactacagaaggggtctgagacgagtatggtggattcgctaattgggcgtcatactgaagaagcattaatgtgcaaatcttgctttgcgatctgctaacagttataggttgccaattggtttggtggtgcacagatttcccattcgttggacgcccctttggctcccccttgcagctgctgacttcatttatgatggttgggccattctgtttgaaattcaactatgcatcaaagtactatttggaacccaactaagctggctgatctattcaactatatctttattccttgctggggatctgaagcgtacgttcaaattttgctgttgggttgcatgattgcagatgaatgatagcttgcaattggccaatcagcttaagagtttttggtggcatgataaacggcatgataaaccaccgaagtac

SEQ ID NO: 11679 - DNA, 476 bp, Triticum aestivum
  Clone ID: LIB31-026-Q1-E1-G2
cgcctgccggtaccggtccgaaattcccgggtcgacacgtactactaaactttccctctgccaactatcaaaaatcttatatatattgtgggtaaaaacactctcccaggagtgcatccatccacccaccgggtgctactccgtggtcaccaacctgaagaaaaacatcttgtacacatctacccatcctcctcccatggacggcgtgagatatgcatctcgcatcatcaacgatcacgactacgactacatacatatgtggcctggcacgtacccgacgttcctagaattttctgccgtgggaagctgtccagcccagccgaccgactgcacgtacgtacgggcacagctagctgcacgtacgacgtatactggtatacggacaacgcaataatgatatgaataaatataaagtaaacagaagataaagttgtcttgaagcagagcggaacacagcagcagcatttgggcgtttt

SEQ ID NO: 11680 - DNA, 467 bp, Triticum aestivum
  unsure at all n locations
  Clone ID: LIB31-026-Q1-E1-G4
taccggtccgagnattcncgggtcgacatcgagccagatgcgcatgtcaagcaggcgatgaatgagatcaatgcagctgcaaggatgagggtggctgcaaacgagaaggcggaggctgagaagattgtccagatcaagcgtgccgagggtgaagcagaggccaagtacctgtctggcctcggtatcgcccgccagcgccaggccattgtggatggcctgagggacagcgtcctgggcttctcagtcaatgtgcctggcaccactgcaaaggacgtgatggacatggtgctgatcacccagtactttgatactatgaaagaggtcggcgcgtcctccaagtcctcggcggtgttcatcccccatggccctggtgcggtgcgtgacatcgccacgcagatccgcgacggtcttcttcagggccagtctgcctctgacaactaagcagtttgcttcgccggcatgaactt

SEQ ID NO: 11681 - DNA, 246 bp, Triticum aestivum
  Clone ID: LIB31-026-Q1-E1-G8
gtaccggtcctacattccggggccacatcgagccagatacgcatgtcaagcaggcgatgaatgagatcaatgcagctgcaaggatgagggtggctgcaaacgagaatgcggaggctgagaagattgtccagatcaagcgtgccgagggtgaagcagaggccaagtacctgtctggcctcggtatcgcccgccagcgccaggccattgtggatggcctgagggacagcgtcctgggcttctcagtca

SEQ ID NO: 11682 - DNA, 455 bp, Triticum aestivum
  Clone ID: LIB31-026-Q1-E1-H1
acgcctggcggtaccggtccgaaattcccgggtcgacagttcactctctgaaactgcaaatggcagaaggtggagaagtcaacatgaacaacttcagcactggcagatgaacagaagaaaaactggcattctcaactgttggaaccccagactatattgctccagaagttctgctaaagaaaggatatggaatggaatgcgattggtggtctttgggtgcaataatgtatgagatgcttgttgggtatccaccattttattccgatgatccaataaccacatgcagaaagattgtgcactggagaaaccatgtgaaatttccagatgattcaaggctgtctcctgaggcaagagatctaatctgccggttattatgtgatgttgaccacaggattggtggtgcaagggctgatcaaataaaggcccatccttggttccgtggagttgcatgggat

SEQ ID NO: 11683 - DNA, 275 bp, Triticum aestivum
  Clone ID: LIB31-026-Q1-E1-H11
gtccacaacggcctgcaagaccatgcagttcctgttctcacagtcaagccagacattgctgttaggctgagctgaagagcacatgacgatgtgtgttgtgtctatggcgccacagcagttggggaggccctggagcttttcgaactttgctttgatggtcgccatctcctcagggtcaggccacttcagatgactgattgcgtgatcctccaaggactcgatgaacttccaagtgatgtttgagattgctgagtggttcattccaaagcgattcc

SEQ ID NO: 11684 - DNA, 459 bp, Triticum aestivum
  unsure at all n locations
  Clone ID: LIB31-026-Q1-E1-H3
accggtgcgatattcncgggacgaccatggcgtcttccaactccggcggcatccccatcaatgtggaacaggattcggacggctcggcccagagcacagctgatatgactgcttttgtgcaaaatcttctagttcagatgcaaaccaggttccaaactatgtcagagaacatcattacaaagatagatgaaatgggtgcaagaatcgatgaattggagttgagcataaatgacctcaaggctgaaatgggcagcgatggtatgacccctactaaagtgaaggacgaagaatcaaagccagcagacagctctgcctgagtcaagcagaagtagcagaagcaagtcgtattagtcttgggttcatgtcaatatcatcagccattcatcactaacttcatgcatgttatgagatgttattcgcactgttatatgcatttgagatatgcagtacctttcgatg

SEQ ID NO: 11685 - DNA, 451 bp, Triticum aestivum
  Clone ID: LIB31-026-Q1-E1-H6
tcccgggtcgacccatcgctgacaagaacacacataccaaacatcagcagcaaacacgcgcgcacacacgcacacatatcattagctagcgagctagccgcacgtcgcacggaaaagaaagatcctcgatcgatgccacaggagctgtagctccatcgatcatgaattcatgatcgctctttctttctttctttctttcagtgcaatgcagcaacaaaaagcacactgatccgtccgtcgatccatccaacaaatttttgattgcgccaaaagcctaaaggtagcaaaggctaataagctagccgggatcgatgaaaggtatatctatccggcgtatgagactgttaaatatgcgccgggtcgtcttcgtctaccgctcacccatgtgcatgtgccggagggaggaggttgccggtctggatgcgagtttcttaatgccatcggatgcaaa

SEQ ID NO: 11686 - DNA, 450 bp, Triticum aestivum
  Clone ID: LIB31-026-Q1-E1-H7
accggtccaagattcccgggtccacgcttctagggtttctggaatattgtggtatttatagagcaaagaggcggtccgggggcacccgaggtgggcacaaccaatcagggcacgctagggcctcctggcgcgccctggtgggttgtcccctcctcgagactccccccaggtgcaaccagggcccatctgcttccttttggccaataaaaaatcatcgtgaagtttcgtggcatttggactccgttcgatattgatttcctgcgatgtaaaatacatggaaaaaacagcaactggcacttggcactatgtcaataggttagtaccagaaatgatatataatgattataaaacatccaagattgataataaaacagcatggaacaatcaaaaattatagatacgttggagacatatcagcatccccaagcttaacccctactcgtcctcgag

SEQ ID NO: 11687 - DNA, 313 bp, Triticum aestivum
  Clone ID: LIB31-026-Q1-E1-H8
ctcgcggtgtcacgcatctccctatagtgagtcgtattacgcggtagtgtacatcaacgctgctaggatcacacccctagctgaactggccaacccaggacaacgacgtgctcgagaacctcacggtcgcgtggtcatggcagtaaaagcactcggagtggctatgcaggctcggggcggaacattttttgcggctctcacacagctagtagttacatgtcatttatatggcgtttcaggtcagttggccacttcgggtgattttatgcgtatatctctactgagtcctccaattgtctcaaaagagggatca

SEQ ID NO: 11688 - DNA, 422 bp, Triticum aestivum
  Clone ID: LIB31-027-Q1-E1-A6
aattcccgggtcgactacccacagtactcggcggcagatgtggcaataggagaagcacccatggatcccatcttctccagaaccaatagccagataccttcacatcacccgtcaatcgccgtggatcttgttgaagacgagaacgatagcagaccagcgatgccgccacgacgatgccgggaaacgatggatggatgagacagcacaggtaagcaccttaataccggtatctgcaattctgcatcgtttttcagaaacagaactagcaattctttccgggcaccaatagaagcatatcgaagtgctatagagcgtgcaattgaaggagcatcaaaacttgggaaacagttgttttccaagcagctgttggcttaagcaaggaaatggcaagtcgtttgccgtgtttcaggaaaaatccgagc

SEQ ID NO: 11689 - DNA, 366 bp, Triticum aestivum
  Clone ID: LIB31-027-Q1-E1-B10
ggtcgacgataaccactaatcgggttcctatgaaagagaaaggcccaatacagaatgacacaagaccaagaaacagtgtttgtatgtgcctataaaagagagacccactagtagagaatgcatctgttatccatgcaatgcacagagataatgctcctgctcacgcatgcattggtatgcataagaatgctcctccaatcaatgaacgcgatgcgattgaagtactgggaaaaaagacatcacacgtaattaagccaatctggggctaataataataaatcaggactcctccagtccgtggccctccggccattttaagatcctagtaattaaactaggggaattcacgtgctagatttgttgcaa

SEQ ID NO: 11690 - DNA, 411 bp, Triticum aestivum
  Clone ID: LIB31-027-Q1-E1-B6
aggtacaagtctagaattcccgggtcgacgttaccgtccatggcgatgatgattagcggtgttcttgatgtatataccaagatgatggagactcgtccctaagtagccgaaacaccttaggaaacggaaaaaccacaactcaaaatctcaaggacaaaagtcaaacgatggtagtgtaatcggtggtggttttgtggaagctcaatgggattgcgaaaatgcaatgattggttttgggacgcaatgcagaagtggagggtaaggtggtgaactatgcacggtgtcggaattggaagcacggtccctaagtagccgaaacaccttaggagacgcagctcacaacacaaacaaaattgggttaagttagggtggcggaagtgtatggtgggtaagcctatacggaagttatgg

SEQ ID NO: 11691 - DNA, 353 bp, Triticum aestivum
  Clone ID: LIB31-027-Q1-E1-C11
gtctagaagtcccgggtcgacgacgcaaccaatgctaggattggaagactacaaaatgaggtggctcagttggacatggagaacatgagtgaggaagacaaaaaccaactttccatccttcatatgaaaaatatccaggaagagaatccaggtatggtggcaaatcttatcttcacaaaggaacaagatctcggtcttgaagatctgaacaagctcttcagtgagctctctcgggtcgaaaaagacattagattccggctacctccattgcatggtcgcgaagacaatattggtggcacatgtgtggcacaagatctgcaactaccaagtgttctaccggcggatcatttggg

SEQ ID NO: 11692 - DNA, 440 bp, Triticum aestivum
  Clone ID: LIB31-027-Q1-E1-C5
ggtctggaactcccgggtcgacttcggagctgagactgcatctcgtccatggcaaggtgttgcgggtgatccgcatgaggatttggcgagttggcatgacaagattagggaggtgattgttagaactaatcttggcatatgtatctgcatgtgtttttttgttttgcatgtagctagtgtagtcatatcgtcggctgtacaccggcaagatgtacgtgtgatacgtacgtagacagcgagccgtcggcccaagaacgtgcatggtgagatgctattgtcgtgcgaggcggcggaagtgcgagatgccgagtgccgtgtgaagcagctgcacaaggataagagccagcggccagcaagagtccagccgagtcgattagtaagtctgttgtggccttgagaagaggtccagtattagatgtggtcaagtttgttagctgcat

SEQ ID NO: 11693 - DNA, 331 bp, Triticum aestivum
  Clone ID: LIB31-027-Q1-E1-C6
gtctagaactcccgggtcgacatagtacctgatgatgcttcacactctgttgggcaagtccctgtcgatgtgcgagacattggggcggatttctacactagcaacctccacgagtggttcttttgccccccggccgtggctttcttacacacctgcaagggtggcccgataacctctcagctccaccaccctgttgtgtcacatgaatatggcaatgggctacctatggacagtggatcggattggggacacgggaatacagtggccagatcgtccttcctgaagctagtcacgttgtgaaccgattctgaaagtggggattgaggggata

SEQ ID NO: 11694 - DNA, 342 bp, Triticum aestivum
  Clone ID: LIB31-027-Q1-E1-C8
aggtccggaactcccgggtcgacacggaccaccaacgtgtgtcgctccagatcatcaccaagccaggtgggggacacgccaacgctgttcctggacatcatccagacgatcgggtgcatggataacgaccacatacgggaagagtaccagaaaggtggctgctgcgggtttggcaaaggcaacttctccgagctgttcaagtccattgcaggattatgacaaatcccttgaaccctagcaatctgctgcagttcatgcatcataggatagaatctggaattggaacctgatacgctgatccactgcattctatcatggtctcatggagcatcaagaacgttc

SEQ ID NO: 11695 - DNA, 317 bp, Triticum aestivum
  Clone ID: LIB31-027-Q1-E1-D11
ccgggtcgacacacactttggcaacatgaagctgcccatcgacaaagtcggcggtaccactcgcctcaagaaggacgacgacgacgaggaggagtgaagtgctgttactgaacatacaacgatagtcgggcagggagccagggaggatccagctgaactcttccctctagcttatggtagctttgttgatggcatcatccgaacatcgtccgtgtttttatgtttcggtgctcagtgttcttcgtgggaactcatccagtgtgtattccttccgtgttaactttgtcaaatgcaaacagacctgagaataaattcca

SEQ ID NO: 11696 - DNA, 266 bp, Triticum aestivum
  Clone ID: LIB31-027-Q1-E1-D4
cgggtcgacacgtatggagataacgtctatggatacagtcctatttacaacgagaacgagtggtcaacgagtggtgacgtgtacaacggaggagtcaccggattggcaatttgggcggtaactctcgccggatttcttgccggaagtgctcttcttgtgtacaacacaagtgctttggctcagtaaatcttaaagttgttatcgcatctgtacacatgtttctacaaatgtgtcggtgttgttcccgttctcgctaaggtggtcaa

SEQ ID NO: 11697 - DNA, 450 bp, Triticum aestivum
  Clone ID: LIB31-027-Q1-E1-D5
gccgccaggtacaggtctagaattcccgggtcgacgaaaacgtcttctcccactgaacgaacatcctccccggaaaggctgaaacaaatctcagaaatgcgagcaccagtgtccggtctgggacttgaaccatggtgggttgataccaccttgctactcgctgtagcgtggtcgaaccaccttctctttccccgtggttcactcgaatgaaccgacatgtcttagttgcagcgccggctccaaaatatatgcacggtacgaggatcatgtcgcgctgtttgagcaagggaggcacggtggcttggtttttggaaattttgagccgatcttctgggggagattagtgtgctttccaaagtgggattccagacgatatcacaatgctaagacaggggaaaggattcccctcttagcctgcaatagtgcgtccaggggtagtgcgagcccaat

SEQ ID NO: 11698 - DNA, 309 bp, Triticum aestivum
  Clone ID: LIB31-027-Q1-E1-D9
gggtcgaccatcaacaccagtctgatgtggagtaagtcggctccccgtgtgtccatcgacgctctttggactccacacgaggcatcgcggtcgcatgagaaattcgtcagagccatcatggtggagttgccgcccactgagatagcagcatcgcgtcacatgccagctcaatcgcaatcgcgatacgagtgttgcacatcccatccactacccttgtggttgttgtgcccatacgcactctctatacgatggaggcttacgtaggcgtgcagtcgacgtgatatctcttctaaagtgtcacgtaaattc

SEQ ID NO: 11699 - DNA, 327 bp, Triticum aestivum
  Clone ID: LIB31-027-Q1-E1-E10
caggtctagaactcgcgggtcgacgaaaatcactaccagtctatgtagaatccagaaccaccagatccaatctagacaccgtcatggaggggttcaccacttccattggtgcctctcctatgatgcgtgagtagttcgttgtagacctacgggtccgtagttagtagctagatggcttcctctctctcttgagtatcactacaatggtctcttggagatccatatgatgtaagcctttttgtggtgtgtttgttgggatccgatgaactttgagtttacgatcagatccatgtttttagcgatgagagttagttgaatcctcgttga

SEQ ID NO: 11700 - DNA, 350 bp, Triticum aestivum
  Clone ID: LIB31-027-Q1-E1-E7
aggtacaggtctagaattcccgggtcgactcccctgcggaatttgggaacatttgggtatttatagagcaaagaggcggtctgggggcactcgaggtgggcacaacccagcagggtgcaccagggcctcctggcgcgccccggtgggttgtctcctcctcggcactccccccaggtgcaaccacggcccatctgcttccttttggcccataaaaaatcatcattaagtttcgtgccacttgtactccgtttgctattgatttcctgcgatgtaaaaaacatgggagatagacgaactggcattgggcactatgtcaataggttagtaccatcacatgatatctaatgact

SEQ ID NO: 11701 - DNA, 424 bp, Triticum aestivum
  Clone ID: LIB31-027-Q1-E1-E9
ccgggtcgactgattttataatatgcgacagtcatttttttagtataaaaaataacggagggagtagaaaacaaggggtacgactatccttgtggcaatgctatgtctggctggctacatgcatgcatgcaatgtttcggcatgtcatgtatgggccatggatgggtcacacttacatcatcgttgaactttcgagtttgatggatatgagtacgcagatgagaaatgaaagatcacatacatttgtataagtctttattgattgtatggacataaaataatagaataaaaatgtatttgtacaattggtattgcccattataggaggaaaacaaggcaaacaactttacacaagtttcaccttttgtaacacacaagtaataaacatatactccctcggtccggaaatacttgtccgagaaat

SEQ ID NO: 11702 - DNA, 411 bp, Triticum aestivum
  Clone ID: LIB31-027-Q1-E1-F1
ggtctagaattaccgggtccacgacggtacacgaatgtatttgtatcaacacggtattgacacacaactatcatgttttcagaacaccgggtgcatatcacaagtgcattgttacaacaagcttacaaaacggtgcataaggctttacccatgtttagacatacaacacactcacattggctcaacaacatctaactgtactagctctaagaactaattacaaccctgtgtccagcaggcacacatcaacggctctgacaaatccagggattcaacacccatgtgtgtcaaatgcaagcacagctgattgcatcatgcttataacttcatatcggcgcgtttggacactttattctcccagatgaacaacatctgttgctgttcctaaaattcgtgtgtcaaatctgaggg

SEQ ID NO: 11703 - DNA, 344 bp, Triticum aestivum
  Clone ID: LIB31-027-Q1-E1-F11
gtccagaattcccgggtcgactttaattgggatgaaagaccaaacacgtgcccagttacgagtcaaaaatgggcttgtaggggtggacttgcatgtcaagggtgggcttgcaactgggataaaagtggtcgggtccgcagttacgtgttgaggatggagttacaactgggacaaaaatgggccaggccaagttgcgtatgaacagtgcactcacaaaaaaatcgggcttcttacacattacggttagacttgccagaaaaaggttgttgcctgtcattggagagtttaaaagcatattcatccgcggggttactctgcgccaacgacaaagaggaatgagacag

SEQ ID NO: 11704 - DNA, 404 bp, Triticum aestivum
  Clone ID: LIB31-027-Q1-E1-F3
cgggtcgacagatccggtgagctctcggtgtccatcagcaacgcgagcgaccaagagagggaatgggttgaggaagaccagcctggtgtatatattaccatccgggctttgcctggtggcatcagagaactccgccgtgttcgattcagccgagagaagttcagcgagatgcacgctaggctatggtgggaagagaaccgagcgaggatacatgaacagtacctctgagacaggagaagaagaagcacagatgagaacaataccggggacttcgccgttgacatgagccagccgtccatccatgttgtacatttgcagtttgagctaacattactcgctctgggcagcgtttgtgaggtgaaggcctcgtcttgagaaactgaactatagtgatctgctaggct

SEQ ID NO: 11705 - DNA, 296 bp, Triticum aestivum
  Clone ID: LIB31-027-Q1-E1-F5
aggcacaggtctagaactcccgggtcgacgtccagcacaagatagccgccatctcatcgaaagacgggacacctttgcttctatcaagtggtatcagattttcaggttgctcaatgagattttacagtttttcatagtttagatcgagtctgttcttcgtacctacagtccacgaaaaagccacacacagcagagatggctagttcatcctatccagaccagtctgagcctttgcataatattttctgtatgtgctttgttgaatttgcggttgcatcgccgtgtcaagttgctgg

SEQ ID NO: 11706 - DNA, 303 bp, Triticum aestivum
  Clone ID: LIB31-027-Q1-E1-F7
gtctagaactcccgggtcgactgccaccacaacgatatctatcatcacatcgaaagacgggacacctttgcctctatcaagtggtatcagatttccaggttgctcggtgagattttacagtttttcgtagtttagatcgagtctgttcttcatacctatagtccacgaaaaagccataaaaattagggttagttcatcccatccgaaccaatctgagccttgcataaacctttctgtattttccttgttgaatttgcggttgcatcgtcctgtccagttgctggtcggaacgtcgagtcgttt

SEQ ID NO: 11707 - DNA, 341 bp, Triticum aestivum
  Clone ID: LIB31-027-Q1-E1-F8
gtctagaagtcccgggtcgactggaaggcgaactcttcgacggatgtcctagggtaagttacttgggacaggtccgtgaccctaccctaggtacataaccccatcaacgacgcgccaggaaaactaacgctagtttagtcccacctcgtcgatcgaaggcgacgatgaccagtttatatacccagctcccgtcgtcagattgaactcctctggtctactaccccgtcgatgctgccctgttgggcctggtttccacggcgtgctctgaaacgcctgttgtagtcgcccggtgggcttgataacaatggtcttattaagacacgctgtggagacggacgggc

SEQ ID NO: 11708 - DNA, 351 bp, Triticum aestivum
  Clone ID: LIB31-027-Q1-E1-G12
ctcgtgggtcgacaccactccctatactgagtcgtaataatcccgcgcgcactctaatgctgcgttcatcgccgagccccactacaccacgccaccgatacccgtggtcattgttctagtagatggaacactgttccacctcaggaccactccagccagcacctgctccagaatgatggccctataagggggaacaacatcgaagacatcgacatcgttttatccggggacccacatctacgtgacgagacaacaacgatcatgcctccacatcgaaacaatgtcagcgatttcgtttgataaatggaatatattaatattacacagataccacttagacccagcctctcc

SEQ ID NO: 11709 - DNA, 370 bp, Triticum aestivum
  Clone ID: LIB31-027-Q1-E1-G3
ggtctagaactcccgggtcgacaagaatgatgcacagctccaggcgatgagtgagcagtgcaagttcatggctctgaaccgtccaaactagcggaagacagatacaccagataagaaacctgctcttgtccaactgatgtcacttacagttacattgccgcggcagtgaaaagaagaagaagttatatccctgggggtcccgaataaccgacgatgatgccatgttcctgggtccgtgattcgtggtgcaaacccaatcgtgaattgttgttaccttagatgtggtgtgtccaaattgcagccatgacacagatttgttgtatcttgaatgtgtgtgtaaatgctgggcgcatttgcctggttttcgtga

SEQ ID NO: 11710 - DNA, 396 bp, Triticum aestivum
  Clone ID: LIB31-027-Q1-E1-G6
aggtctagaactcccgggtcgaccggctgcgataagatgactcatggggaagaagaaaatgggtgaagaaaatatccaaaaggctgtcaagattgccatagatgctgcagaagctgctctttctgaaggaaaaaccttctgtgttactcatgctgatgtgggtcttgacaccactgctgtccgggaagcagttgtcaaagccatgaaccgtttcaagggtttgccgataatggtattcagcacagatgaggcatcaaacaaggctgttatttatgccggcgtacctccggatgcacccaatggcttcaaggtgttggactggcttacaccttcaatcgcatcactcaatggaaaatgaggcggcggcaagaatggtctcgcccagggccagggaag

SEQ ID NO: 11711 - DNA, 427 bp, Triticum aestivum
  Clone ID: LIB31-027-Q1-E1-G8
aggtacaggtctagaagtcccgggtcgacaaaagcgaagacaaacaggcccaggccaacaacatgatacacaacaaacaaacaaacaacgacaagcgcggcgggggatagagtgcttacacgaaaattatgaaactaaatcaaaagatgccaaacttagctgatacatcatttagaatagttgtggatttaaaaatatactatgaaattgtaaaaatcaaggattttacgacaaaaaaggtaaacaaaaccaaaagaaaaattgagaaaaacaaaataaagtgagtgtagagagtagcgaacaggaaatatctggaaaaaaaatgctcgccgctaactctttcaattattccccggagcctacagagaacaagcaaaaagaggcctactctctacatagacacacacggaagacaagcccagttcag

SEQ ID NO: 11712 - DNA, 343 bp, Triticum aestivum
  Clone ID: LIB31-027-Q1-E1-H3
ccgcgcaactctcaccggtattgaaaccattatttaccttcctcaaaacagccaccatacctacctattatggcatttccatggccattctgagatatattgccattcaacattccaccgttccgtttattatgacacatttcatcattgtcatattgctctttgcatgatcatgtagttgacatcgtatttgtggcgaagccaccttcataattttcatacatgtcgttcttgattcattgcatatcccggtacaccgccggaggcattcacatacaatcatatcttgttctaactttgagttgtaatttttgagttgtaaatccctaagagtgtgatgatc

SEQ ID NO: 11713 - DNA, 325 bp, Triticum aestivum
  Clone ID: LIB31-028-Q1-E1-A1
gggtcgactactgcacacactgcatgcatatcaatctgactactgcacacagtgcatgccagcttctacgccggtctcgtcatcagattatgtttatgatcgagtgtatcgtgtccgccttccacatatgagtcgtttccatagatattcgaatcggtataattgtatcaatgccttctttatgtgatatatgcgtgttattgagcgtgtggactgtatgggcgtctatatccatgatcaatataacttccaacttctgcttcgaccaagagaaaggagggagaggaggagaaaaaagcgggcgctctagaggatccaagcttac

SEQ ID NO: 11714 - DNA, 440 bp, Triticum aestivum
  Clone ID: LIB31-028-Q1-E1-A11
ctcatgggtcgacactacaccctatactgagtcgtattatgaaaagaatccagaacagaagcgtgtgcctgtttcaattgatgtcccagatcctgacttccatgattttgataaggatcgcacagagagagctttttatagcgaccaagtatgggctacatatgacagtgaggatggaatgcctcgtctatatgcaatggtgcagaaagttctttcaatgagacctttcagaatccgcatgagtttcctcaattccaaatccaatattgaactgtcgccaataaactgggttgcctctggtttccagaaaacatgtggcgattttagggttggaaggtaccagattacggaaacagtcaacatattttcgcacaaagtcagctggactaaaggcccccgtgggattatcagaattattcctcagaaaggtgatacatggg

SEQ ID NO: 11715 - DNA, 396 bp, Triticum aestivum
  Clone ID: LIB31-028-Q1-E1-A3
atagtgagtcgtattagaggattgggcgagcttgatgtgtcggcgggttgggcaagctataggccgataacaccggcgcatggccccacgatgatgaagaagtcgtgtcgccatgacatgagttctcctccgatgcgtggtggggagatgggggtctatgctgggaagggagattggggactggcggttagagctcaggcaagacaaagaacggtggcaaggtcaggaggacgaatttggggatgtgaggccagccgggatttaccggacatggggtggagcggtgacccccacttggatctaggagacgactagggagcaacttttttgtagtctcatacgatggtggatggttgccccggacgggagtgtacagtagccttcgcaaatgcacca

SEQ ID NO: 11716 - DNA, 199 bp, Triticum aestivum
  Clone ID: LIB31-028-Q1-E1-A5
tcacaactcactaaagtgagtcgtattaaacgtcagacaagagagccaaggataatggaaccaaacgagacacacaataaagaaaaggaaatagaaatgaaacataaaacccacgaatcgggttcagaaagaacaccatcaagagtgaaaacagaaccagaacctaagactaaaaatgaaaggaacagaagacattgaa

SEQ ID NO: 11717 - DNA, 264 bp, Triticum aestivum
  Clone ID: LIB31-028-Q1-E1-A6
tcgtaggtcgtcgctacaccctatactgagtcgtagtagcaaaatggtaaagatcgacgcagagggaaaaatattactgctccgtacagtgcggtgtacggacgagagccgtggtgcaatgcaacagcagcggcgtgccgcctggctcttctttttgtcctggagatgtgcttattgctagactctgacagatgaattgcgtttctctccgcaagtaatttgagtccttcagcatgaaagtgatcgaggcaccgacttcggccg

SEQ ID NO: 11718 - DNA, 422 bp, Triticum aestivum
  Clone ID: LIB31-028-Q1-E1-A7
attcgcgggtcgactaggaaagattcataatcagcatggaaggttcttatcatggataagtttacggtcaagataatgtcctactcatgtaagatggcagacatcacagaagaaggggtttcattggttgaagatctatacaaacggagacagccattgccttcactggatgctatatatttcatccaaccaactaaagaaaatgttgttatgttcctctctgacatgtcaggaagaagcccgttatacaagaaggcgtatgtgtttttcagttctcccatacagaaagacttagttgctcaaataaaaagggattcaagtatattacctcgtattggtgcacttagtgagatgaatttggagtacttccctattgattcccagcagatggtaatttgacttgacgcctcacgtttgctcag

SEQ ID NO: 11719 - DNA, 99 bp, Triticum aestivum
  Clone ID: LIB31-028-Q1-E1-B1
atagtgagtcgtattatacgaatcggcatgccatgcaagcctgccatcacgatgtgtctgacattgagtgtacgtatgacatagagtggagcatgtcag

SEQ ID NO: 11720 - DNA, 429 bp, Triticum aestivum
  Clone ID: LIB31-028-Q1-E1-B12
cgcgtaggacgtcgcaacacgctatagtgagtcgtattaccctgcgcgagttcgggcagcggcccatgttccaggcggacgtggactcgggcaacttcgaccacctgcccacggagctcaggcccatgagcaagatcatctaggaactcgagccagcagtcgccgcaggaccttgggcgagtagagttgctctgaaaagacttgtagatttcagtttcaggccggtttgaggttgacttggcgagaagttgcaggtttgaggttcagtttcaggctattccacttagtagacatgtaataggaggatgtacgcagtcaagttgtggtgatggttgagccgagcgtgctgaagtatttagtcggccagatggtttgctagccaggcaggacagagcagaagccatttgaactaggcatgtgagtgaaaca

SEQ ID NO: 11721 - DNA, 434 bp, Triticum aestivum
  Clone ID: LIB31-028-Q1-E1-B7
attcgcgggtcgacgccaccgaggacgagctcttcaagctcaccaccaaggaaggcaagctcaccgtggagcgcgagaagatcaagatcgagatgcagcccttctcccccgtcgtccagttcgagcaggaccccgtccagatcctcgacgctctcctcccgctctacctcaacagccagatcctgcgtgccctccaggagtcgctcgctagcgagctcgccgccaggatgagcgccatgagcagcgccacagacaatgccatcgacctccggaaaaatctctccatggtctacaaccgccgacgccaggctaagatcaccggagagatccttgagatcgtcgctggcgccgacgccctgtccggctgattcctcctcgccacctgagctgagccgccgctgttatatataactctttgcctccttttctcctct

SEQ ID NO: 11722 - DNA, 421 bp, Triticum aestivum
  Clone ID: LIB31-028-Q1-E1-C10
tcgtgggtcgacattgtgctctacagtgagtcgtattagtttatcgagagttttctactattcttcagactgaaggtgaccttgattttgcctccaccatggttcaggcattgaatttgattttgctcacatctactgaacttgcggagctgcggtctcttcttaaaaagtcattggtggatacttgtgggaaggacttatttctatctttatacgcttcttggtgccactctccaatggctaccatcagtttgtgcttacttgctcaggcatacaatcatgcgagttctgttattcagtctctgggagaagaagacataaatgtgaagtttctggtgcagcttgataaattgatccgtctattagagactccagtatttgcttacttgcgtttacagcttcttgagcctggaaaacacac

SEQ ID NO: 11723 - DNA, 436 bp, Triticum aestivum
  Clone ID: LIB31-028-Q1-E1-C12
tcgtaggacgtcgctataccctatagtgagtcgtatgtataactcaatgatggatatacactcccttatcatgtccctcaatttcacccaaattgagataaaaactgcgaactttgccaactcatggggagatggggtgctagtgatggtctatggtcttgtacagaccaaagagtacagcaaccaaaggaaatttatccagatgtttttccttgcgcctcatgagaaaggttactttgtgctcaatgattatttccactttgttgaccaagaacaagtgcaacctgcacacgtgagagctcacgaagcctttgagaccaacatggcatccaacacagtccaaacaagtgcggagtacattcatgaagaaagtcaaacaatgcaagctgttccagtaacatctgaagaaaattatgctgttgacagttacacttac

SEQ ID NO: 11724 - DNA, 401 bp, Triticum aestivum
  Clone ID: LIB31-028-Q1-E1-D11
actccacactatagttagtcgtattagcaagttcataccaaaagatcgttaacaacaataccaacttgtggatgacaaggtagtacaactaccaataccaaactaacttataatctttttactcctggccctagtgttcgtctggtagaaaatcttgtagaggaccaactcccgctccttctcttgctccagatccccgaggtggtactggtgcatcacccagttggtcctctgctggtgtgcagcaccagaaccttttttgctgcccgtctgccggccgttgaccatcatcggcaatgtattgcctgtcttgtgccacatcgcgtgcatgccgcactccgactgtatctgtgacacgtccaactgccccttttgaatgccctggaattgcgttggaagaa

SEQ ID NO: 11725 - DNA, 342 bp, Triticum aestivum
  Clone ID: LIB31-028-Q1-E1-D12
ccctatagtgagtcgtattatatagatacttaccagaaattaattaaatcctacacttaaaagacctagccgcgaaattctacagcaatcttatggagaactactaagatagaggatgatgttcttagaaagaaagtccttataagcataatttcaaacaatatgaagatcaacattaatccactggtttacatatacctcgtagcagcagtttagagtagaccggttttgagaaatgaaccttttttggatagttttcacttttattagtttaggttttaccttttcttttttgtctcccagtatagcgtaattttacaagtttggttttcatttcttttc

SEQ ID NO: 11726 - DNA, 442 bp, Triticum aestivum
  Clone ID: LIB31-028-Q1-E1-E1
gtccgaaattaccgggtcgacgactgatagttgcaattgcaagcatttatttggtccagagaaaacaacatggtcagtatcttcaaaagccacaaagcagttggctatcactcgttgtccgaagatcttgtgcattcatttgttacgtacttcgattagttttgatggtgaactcgtaaagcgtcagggacacgtttcttttcctttacatctcaatttatccccatttgcaggaggcacattcaccactggacagggacctggaccttcagctatgaacgtgcaaggatatgacacgccgtctctccaattctatcggcaactaaatgcagacatgcccattaatatgtttcctactggtgggaactcatcaagtcaggcacctaaggatcaagtagcaaatggtggtgtccagtcacttaatgagggaaatgctgatgtg

SEQ ID NO: 11727 - DNA, 451 bp, Triticum aestivum
  Clone ID: LIB31-028-Q1-E1-E11
taccggtctagaattcccgggtcgacgacggccatccaccagccggtcgcctacaccatatggagatgatccacggtgccatgccgctggccggcatcgtgaaccatctggcatagctgctggctgctcgcgcgcatcaccgccatgggtctggagtgggcacttttgcaattattagtgtaggtgcttaggcaaatgcttaggtgcgtacgatgtggtagatgcattggaatggaggggtgcctttatatgagtgcaaactgtgttgcattcacatcgtgctgcctctcttttcccagtcctcccattacttcccttatgcattcgcatgatgctaattgaaggaggatgcatcattggtcgttcaacatttcaggaacagctaccctctccctcatctgcattatagctgtattgggaactgcgtcgcccgctgtcaaatcaaatagta

SEQ ID NO: 11728 - DNA, 457 bp, Triticum aestivum
  Clone ID: LIB31-028-Q1-E1-E2
cggtccagaattcccgggtcgactcaaagcttggagtgctatagcagcatcaagattctgttgataatctacaaagtgttgtttcagaagaacaatcaggtagggaggaaatctcagcggtttcaggggaccttgaatgcttggtagaagctggtcatgatggaaacgatagaggtcttactggtacatcaaaagatgagtttgaatcatcagggcatgttgcacctgacaattcttcagctggtttatttgatgaaaatggtccaaacgtttcctcagtaaatcacgagtggccagtcaaggaagatgatacgcctgttttagaagacgagcctggaactaattctgggcctcaagaaaaagagatagcacctctaaacaatttaagcagcgatataatttctactacggttgctgatacatccaataaatcaatggataaacttgactgttcagg

SEQ ID NO: 11729 - DNA, 444 bp, Triticum aestivum
  Clone ID: LIB31-028-Q1-E1-F10
gtctagaactcgcgggtcgaccggttcatatataatcatacgtgagaacaaatttatgcttgtttgtagaagtatatacactctttctgagattgtagcatactagcatgtgattatgggatgagagagagagtcttggacggtgataattgtattaatgaggtttatgttgcctattaaatcaccgacaacgcaagtcatatccggccagccgagaaacacatactatttccgtcgtgagatttttcccgtatatcatgcacgtctaaagctgggcagatcgaggctacaagttaaattgcttttttttcctcttttttctaattaccagtgcaaatacatgagtgttagtactctttccgtttcaaattgtaattcacgtattagattctgttgggtttttttactttaattggtttcaccttttttttttcactccagaca

SEQ ID NO: 11730 - DNA, 373 bp, Triticum aestivum
  Clone ID: LIB31-028-Q1-E1-F12
ctcgtaggtcgacacgattccctatagtgagtcgtaataggcaactcctgccgtcgatgctctatggttgtagcacttcggtgcgtctcccccgccctcgcggtctgcatgagttttcatgaacaacgggcagcagtcacaccatgacacggatgtgacagaataacatgttggtcgtagcaaaaagcaatggcggttgcaacacaaacactgtcggagtcgcagctcatcatgaatggaaattgccagtcatagcaaaaattgacgacaattgcagcagaatcatcatcgtcgccgtgaatggctgtagcagaataattcaccggatgtagcaaaaatccacgacggttgcaacagaagaaaaatcatcacc

SEQ ID NO: 11731 - DNA, 414 bp, Triticum aestivum
  Clone ID: LIB31-028-Q1-E1-F9
acgctgccagtaccggtctagaattcacgggtcgacgcctaaaaatgaagttcttcgactgaagactttctgaagactttgaaagtgaagaaattggtgtgaccttgaagacttggtattagttcgaggaacatgaagcgtgaagacttttgtttgcgtagtttcattttctctttttgagtcataggagacaacgtactgttaaagggggtcgaggaaatactaaggaaaaatttccaagtgatgctcaactcaaaatcgtacacctagcaatcccttcgagtgaagccattagaaatctcatacagttcagtcaatttcttcagttacagagacggagttcttctgggctctgaggaatttgtcctgactgaggagttacgagttcagcagtgcggattgcctacacagtga

SEQ ID NO: 11732 - DNA, 426 bp, Triticum aestivum
  Clone ID: LIB31-028-Q1-E1-G1
gggtcgaccggggtgttattctttcttgcgctgttatcgctatttttactgtggcgggatttagagcggcgcctccttcgtcgcttttgttgctgcttgaggggattatcctctgttgcatccttccgttcctcgccgttgttttcttttggtgtatccaccatatatatatatcgtatgatgaggtggctgtccagcgccccgtgggcggtggttcctgttcgtctccagcattgtcgtccataccgtcgatgtcttcggagtcaaagtcgagcgtgtcggttaagtcatcgacagtggctattaaaagggtggtgggtagggaacgaatttcctcgtcgtccgcttcccactcaagccggacatagttcggccaagagtctcctgacagagagagagacctcaatgaatttagtacatcgccca

SEQ ID NO: 11733 - DNA, 399 bp, Triticum aestivum
  Clone ID: LIB31-028-Q1-E1-G12
aggacgtcgtaacaccctatagtgagtcgtataaatcgaaagacgggacacctttgcctctatcaagtggtatcagatttccaggttgctcggtgagattttacagtttttcgtagtttagatcgagtctgttcttcatacctatagtccacgaaaaagccaaaaaaaaattagggttagttcatcccatccgaaccaatctgagccttgcataatcttttctgtatttgctttgttgaatttgcggttgcatcgtcgtgttcagttgctggtcttagcgtctagtcttttagagtttcgagttctgttcacaagttgtcacgccgtcgccgcaccatcatcatcgccctgccatctaccagtaccgcttcgaatccgtatccatagaccaccacaact

SEQ ID NO: 11734 - DNA, 426 bp, Triticum aestivum
  Clone ID: LIB31-028-Q1-E1-G8
tcgtaggtcgacattatactctacagtgagtcgtattagtttatcgagagttttctactattcttcatactgaacgtgaccttgattttgcctccaccatggttcaggcattgaatttgattttgctcacatctactgaacttgccgagctgcggtctcttcttaaacagtcattggtggatacttgtgggaaggacttatttctatctttatacgcttcttggtgccactctccaatggctaccatcagtttgtgcttacttgctcaagcatacaatcatgcgagttctgttattcagtctctgggagaagaagacataaatgtgaagtttctggtgcagcttgataaattgatccgtctattagagactccagtatttgcttacttgcgtttacagcatcatgagcctggataacacacgtggc

SEQ ID NO: 11735 - DNA, 361 bp, Triticum aestivum
  Clone ID: LIB31-028-Q1-E1-H1
gggtcgacagcatcacggaaactaaatctaaggattttaccaactccgagaggggcctgaactcgtaaacttgtgtgtacaacctcgccgtagctagggccttgtctcctcatacataccccctactctttctgtcagacttagtaccatgactgcatggtcggggcatcatgggtacatatgtgtgtgagatactcaaattatcatggtatgtgtgtatgtaggaactcagcagtgaacttgcaccggttcatgttcttcacattgtgtatctggtcctgcataattgcggaaaaaatgaaggaagggcgtaacagaacaagcgggccgctctaaagggtcaaggcttacgtacgcttga

SEQ ID NO: 11736 - DNA, 361 bp, Triticum aestivum
  Clone ID: LIB31-028-Q1-E1-H10
ctcatagtacgacactacaccctatagtgagtcgtattagacacggtgtggaacttctcatggaagcttcttgcaaggatatttaatcttttgaataattcttccggtatcgtaaattggatcccttgcagttatggttctgaccatatttcctccttgatcacatttactgggtaagttaaaattacttatcctcttcaaatcatttcccctgtccaacctctactccgatttaccttctggcattacacctagtacttgatactgggaagctttataccccatcacatcattcctagcctgatcagctatatttttatcatgtcaactttttaactgggccacctggtccttatgccgg

SEQ ID NO: 11737 - DNA, 418 bp, Triticum aestivum
  Clone ID: LIB31-028-Q1-E1-H12
gggtcgacgctgcgacaaaacgacagacgggggagtccgagcaagaatgagcatcgatctagtccttttggggatacaagcaaggagaaagctgctgctgcctcgagcaacctagctaagctgaaagacctgtacggcgacgtaactgagaataaggatgacagtgatgccaggtggcttcaccatgattcatgtgccgaggaggttatcaggttgggaggccctacgtggagataaatttgaaccgccgactctgtcatcaaagtcatgttactccaccgtttgatctaccggcttctgcattggcattagtgagagtttagtctttgtaaacacttgtactttatgttgggtcatcaatccatgtccttcggacgttcagtcagtctaccagattcatcaacacaacgttatcatg

SEQ ID NO: 11738 - DNA, 335 bp, Triticum aestivum
  Clone ID: LIB31-028-Q1-E1-H5
taccgagtccagaattcgcgggtcgacgtgagcaagctgatctggacaccgtacaaggagcaaggctaagcaaagcacatctgccatgcggccatgccatgtcgaattagataagctgaccaatcgagtcgtgtatattttaggaactccttccttccccgtccctcgtgcagtgactctactagtctcttttttccgaactgtggctgtagtggtcttgtgtaacatcagattgttgtgtctctcagcacgttgtttgccaagctttccgattaataactatgtcacggttctgtatttgtggtcttcctgctcatataattggatggagaagc

SEQ ID NO: 11739 - DNA, 395 bp, Triticum aestivum
  Clone ID: LIB31-028-Q1-E1-H9
ctcgcgggtcgacataacaccctatattgagtcgtatgatactacctggcatacttctggatgaacaacaggatgactagagatgctctcgggatcaaggggggaacagttggcgagtgggtgagatgcaaacaagaactcccctacacacaggacatgccaagcagcataccagtaccatcttaatctcaccacgagaggttaccgtgcactcgtatacagcggagaccatgatctccaggtgcctcagctcagcacgcaggcgtggatcagatctttgaacttctccatcggcgatgactggagggcatggcatctcgatggcgaggctgcaggatttaccagcacatatgcaaataacttgagctttgcaacagtaaagggtggaggtcaga

SEQ ID NO: 11740 - DNA, 282 bp, Triticum aestivum
  Clone ID: LIB31-029-Q1-E1-B6
tcataacaccctatagtgagtcgtattattcgatgagaggcgtgaagatacaggggacagtggtttgccccagacgagtgttcacagtcacttcctgtgagaatatattatggtcgggaattaagtcagctacttaccgtttatgggatgtgtcgtgaaggttggtcacattttggtggtaatatgtacttgcatgaactaaatcatgactcatttttaatcatcagctttagaccatatcaatgtagggtatatatgctacagcgatcgtgctacaggatg

SEQ ID NO: 11741 - DNA, 309 bp, Triticum aestivum
  Clone ID: LIB31-029-Q1-E1-C4
gggtcgactccttccagggaagaaagaaagattacattattctgtcctggtgtaagaagcaatgacaacaagggtatcggtttccttaaggatcaacgcaggttaaatgttgcattaactcttgctaggtatggaatagtcgttcttggaaaccctaaagttctaagcaagcagcctctttggaatagtttgttgacacattacaaggagcatgattgcttggtaaaaggacctttgaacaatttgaaccagagtatggtgcaatttcagaaaccaaaaaagatctacaatgatcgaaaactgtacctg

SEQ ID NO: 11742 - DNA, 362 bp, Triticum aestivum
  Clone ID: LIB31-029-Q1-E1-C8
attcgcgggtcgacggtgatggccagatcaactatgaggagtttgtcaaggtcatgatggccaaatgagcacccaaccgtgctcccaagacaggaggagaattgtgcattgcatattagtttaagatgcaactcttatttgatcgatttccagttaagcatcctacctagctgtagctgctaaaacggatcggacgacgcaattcctgctatgttctccagtgtgtttccagacctcttgtgttttatgtgaacttgtgtcctccctggtgtatcctgattgctgttgcgcccgtttgtagtatattttttcatcaacttctgcttgactcttctagtatcaatggaaagctggtgtttcgc

SEQ ID NO: 11743 - DNA, 300 bp, Triticum aestivum
  Clone ID: LIB31-029-Q1-E1-D6
tcgtaggtcgacgctacaccctacagtgagtcgtattacacttactacgtgcatgccgctgacgataaccagcagtactttaggaggatcccacacaagaagtctgcgactcgttcgatctgtcgcggacttagtgctaaccaactgaagacatcctgtccatcttggctccgtacataaatatggttgcatcctctgactcgattatatacgatcacttgtaatctaggtaccaggctacaggcttgtattaagaagctggattgacttacacggatatgaacattgtgttatgatatc

SEQ ID NO: 11744 - DNA, 446 bp, Triticum aestivum
  Clone ID: LIB31-029-Q1-E1-E7
taccggtcctaaattcgcgggtccactagaaaataatcaaagtgcccgtactgcaacaatggagaaggttagtgatgggtcatggacaaagaacaaccccggcaagtatttctacaagtgcaagcatcactggactaggaggtgtaaattctgttaatgggaagcggtgtacatcaagaagtgctttgtgcaaggtggcctaagctgttcatccatgccgacaacttgcccaagaataataaggcgcctctcaatgtcccctcctcatcgttgggattctcagcccagccgttgttctgtacccctgcatcaggctacatggaatatgctaatttagggatctgtgaagctaatcccctagatgttccctaactatctatccaggaagtttagtacctgccatatatgtgtgttaccagggatttcctttaccaagaatctgccgg

SEQ ID NO: 11745 - DNA, 402 bp, Triticum aestivum
  Clone ID: LIB31-029-Q1-E1-F2
tcgtagtacgtcatgacaccctataatgagtcgtattaaacgtcggtttcccatgccattaattcctaaatagcaacatgcaatttttatttaatgcgccaaccaatgaaaatgttagcatgcaaaatgaaaattaatgatcatgaagatgaggaacttattccacgcatgatgacctatatatttggaatactatatttcgttagacgctctatgcatctggacggaaggagtactccaatacatgagtcgttcagagtcccttgaagtccgaaatggagccaacggtaatcgcacggcgcgcgcccatcatacccacccacgccacaacggctgcgtgtgcgccttggccctggcagtgggatgaagcttaacatttatgatggatcgctcgtgcgtcgc

SEQ ID NO: 11746 - DNA, 439 bp, Triticum aestivum
  Clone ID: LIB31-029-Q1-E1-F8
cctgccgtaccggtccagaattcccgggtcgacctgcccacgaaagccactgctacttagccgccattcggtgggccggcgccctgagtcgaggaggtggacgtcgtcgatggatgcatatcttcttcttgcctcctgtaaccagcactgcatcacctcgtggccttaatgttttattagtataggagtatatggcatttttattccagtagtaacgttttcactgtgaggtggggcgcagttgagcaaaccgaccatcggcaaatccccaccccgcccaccgggcgtcggctgagtttagaattagaagagagaaacgagggagaagagctagctgtagcacagacgctgttgtcagatgggactcgcgttgatagaataggagtacagagcactcgtacctcttttttgggggataaagcagtcatatgtctaatac

SEQ ID NO: 11747 - DNA, 388 bp, Triticum aestivum
  Clone ID: LIB31-029-Q1-E1-G1
ggtccgaaatatccgggtcgacctgagttttggacttttaatggcccatgcctttcatggtccaatacctgcccggtttctctttcggcctgctaaaggcccacaacacagttgggccatttacaatacaacctgactttcggcctcttagcggcccatgctcttcatggtccaatacaagtccgctgtctctttcggcctgctaaaagccgacaatatggttgggccatatgtacaccgaacttattaacggcctgttaatggcccgtgaaatcaaatgggcccacatgttgcccgctttgatgtcagcctgttaacgaccccggatgtaagacggccgatcattaaatttcggcctggtttgtcccaaagaaaaatggcctggtaa

SEQ ID NO: 11748 - DNA, 436 bp, Triticum aestivum
  Clone ID: LIB31-029-Q1-E1-G3
cgggtcgaccaccccctccactacagaggacaccgccaccgccctctgctgggacggaaaacccatctcgtcgctgcagtgcggactgtctgacaagctgcaacgttgcctgggaagagcggatggcctggaacaatatttgaagaagaccccgtgcagcgttgacgcctgcgattacctgcagactctcaagatgcgcctccacggtatgattcacaacttctgcatcaaggcgctcaagctgctgcccacaccatcgggctcgcttatgtgtggcttcctcatggccggccactgctacggctccatggaccctgtctctaacatcatcgtcaactccatttggtacaacttccttggcggtcctctcccagcgtctgaaggcagcaagattgagcaatacaatgacatacttgaccccctatctctgctccgc

SEQ ID NO: 11749 - DNA, 433 bp, Triticum aestivum
  unsure at all n locations
  Clone ID: LIB31-029-Q1-E1-G4
gggtcgacactaaggcaaaagatggagatgatgcagaagctaccaaaggtggggaagattcagatgattcggatggtatggacgacgatgctatgtttcgtattgatccttatattgcgaggattttcaaggagcgcaacaaccttcctggtagtgaaactcagcaatctcaacttatgcgatttaagcttcgcgtgcttactttactggagatatatcttcagaggaatccaggaaaaaaactggtgctggaggtgtatgctttcttaatgcaagcttttgtgaaatcacatagtgccgatggcaatgagcagttcaggcaacgtattggtggtatattgcagaaaaggatattcaaagcaaaagaatgtccaaaaggctttgatgtcgaacttagtaaacttgaaagtttgctgcanaaggctctgcatct

SEQ ID NO: 11750 - DNA, 468 bp, Triticum aestivum
  Clone ID: LIB31-029-Q1-E1-G7
taccggaccagaattcccgggtcgacgacctcaacgggaccaacaccactgctaactcaatgatggatatacattcacttatcatgtccctcaatttcacccaaatcgagataaaaactgccaactttgccaactcatggggagatggggtgctagtgatggtctctggtcttgtacagaccaaagagtacagcaaccaaaggaaatttatccagatgtttttccttgcgcctcaggggaaaggttactttgtgctcaatgattatttccactttgttgaccaagaacaagtgcaacctgcacaggtgagagctcaggaagcctttgagaccaacatggcatccaacacagtccaaacaagtgcagagtacattcatgaagaaagtcaaacaatgcaagctgttccagtaacatctgaagaaaatgatgctgttgactgttacacttactctgaggcaccacagcaag

SEQ ID NO: 11751 - DNA, 370 bp, Triticum aestivum
  unsure at all n locations
  Clone ID: LIB31-029-Q1-E1-H5
gtgggtcgacgtcacaccctatagtgagtcgtaatacattcccttcttgaaggacatttaaggacgcgttacgtctcttcttcgacgcagcggcaaacgacgaacctcggtctcgaatcatgtcatggtttgtattctcggaattaaatcgcactgtcaagaaaagagtgacgcagctcatgtagatgagcattaagagttttttttttcctttgtcgtttaagagaatgaatgaaaccagacattttcttgagcagtttgttgaactgagaatatgtttgttgcatcccgtccgttggattaataaagagatcatatatatctgttgtaaaaaaaaaaaaanaaaaaaaaaaaaaaaagcggccgctct

SEQ ID NO: 11752 - DNA, 421 bp, Triticum aestivum
  Clone ID: LIB31-029-Q1-E1-H7
attcgcgggtcgactggggttatctgcgggattgggccggggatttttctcatggagaaggtaataaacttaattagcaaaatattcactcatctcttatcgcagtccgtccgtcgctgttaatcaaccggcggaaatcgtcgtggaatcatttttgttctagctgattcgtgggtgttcattcatgtgtgcatagtgcgagcacaaatccggcaactgtggtcgtggccagtcggaaacgaagttctatctaacaaatccggatgacttcagggagcgctcggtatgttcaatctcaacgtaccacggtcggcatggcctaaatttgtggacatataccgtctgttgctacattatctatatatttgcatcaaatctttgttacgttatatattttcaagtctatatttttgtacttttc

SEQ ID NO: 11753 - DNA, 418 bp, Triticum aestivum
  Clone ID: LIB31-029-Q1-E1-H8
tcgcgggtcgacagatctgacgaggcagtggcgagcgtcgagaaccctggctggtgcattgccaaagccgtggggtacctgattctcggtgctaccatttgtgccgcatttgcagacccgctcgttgatgctgtccacaacttctctaacgccacacacatcccgtccttctttgtctcgttcatcggcctcccgctggcaaccaattccagcgaggctgtctcggccatcatcttcgccagcaggaagaagcagaggacttgctcccttactttctcggaggtgtacggcggtgtgaccatgaacaacacactgtgcctgggcgtgttcttagcgctcatctacttcagggagctgacgtgggacttctcctcggaggtgctcgtcatcctgctcgtctgtgtcatcatgggcctct

SEQ ID NO: 11754 - DNA, 454 bp, Triticum aestivum
  Clone ID: LIB31-032-Q1-E1-A5
attcccgggtcgacaagactatggacgaaattaatgaacagacagaaaacatgaaacaaatacaagatgctctgtcagctcctcttggagcttctgctgattttgacgaggatgaactggaagcggagctggaagagttggagggagcagagttggaatcccaactactggagcctgttgtaactattcctattcatacgacgcccgtcccaggcaaggcgcaaccaactcgccctgctccacagaaagcatcggctgaggaggatgagcttgctgcactgcaagctgaaatggcattgtgatcaggcccccagtgaatgaagaggtgaaatgtacaaatgattggctggacggtacgctgtcgcaggcgagtcctggctacacatatatttgcccgtgtgtataatctttggtgggagacatttggcgaacagaggcaagaaaggctgctcca

SEQ ID NO: 11755 - DNA, 452 bp, Triticum aestivum
  Clone ID: LIB31-032-Q1-E1-A7
attcgcgggtcgacatgtttacagagagaggtgtcgatataaacaaatcacgtcaatagtagcatcatgatcattttattataatatcagtatctcatcatacaacttctcatgagcaagtaacaattcatcacaacggcaaagtatatggcataaactttcttggtagctaataaactatgttgttagtcaacagtgcaattgcagctcatcgtgtttttaggcagggtcgcatgttagagcttttgttcaacaggtccacatactcgactatcgtttagtcttctatgattgctaacactcacatatacaaatatagctagcgtgtcagccagacacatagaaagataggggcttatgatttcacctcacgattcatttacctcaagggtaatgtcaacagtaataactcattatcactcagactcaactggatacatgtgtcgacatct

SEQ ID NO: 11756 - DNA, 453 bp, Triticum aestivum
  Clone ID: LIB31-032-Q1-E1-B5
attcgcgggtcgaccttgaacacttctgttcatgctcattgaaacaatgtacaatttttcatgaagattctcaaaaaagtaattatccccttgtacaaatccattgtattataaaactaatgtcccaagatttgcctttaggatgattagattgcttgttggtatgtgcggtgcaggaacataaactttggctgtagtgcacgatttacattttttactggaaagtcaaaagcttctgaaacttttcgcacaatattggtataaaaattgtttattttgtcctaattttcagaatttttggagtaccggaagcatggtagatgttcagattactacagactgtcatgtttaagacatattctgcttttgatgcattgttttgcttgttttgatgaaactatcgattctataggtggtataagccatggaaaagttataatacagtagctacaa

SEQ ID NO: 11757 - DNA, 446 bp, Triticum aestivum
  Clone ID: LIB31-032-Q1-E1-B7
gtaccagtccagaattcccgggtcgacagaagacgacagaaggggtgtcaagaaaggtgtgtggtggcaggcttggtctccggcctcggcatcttccgttggccccggtgccgtgtggctgaggcgatgttgtttggcattagctacaaaatagccatgatgttcctctttaagccctggatgggaaatctgttgcaagtgctcaaggggtgttaagagcatatgcttcccaaggccaacattgtgatgcatgtgttgttagtttagaagtgttttggtatagcaacacgagctgacatgtagtttggtctgtagttcattgtacatgcaagttgaattgtcctgaccattttatgaaacttaatttagctttttattggattgcagggtggtatgaatatgtcgtatgatgaataattttgaattatggttggtataaatccaaa

SEQ ID NO: 11758 - DNA, 465 bp, Triticum aestivum
  Clone ID: LIB31-032-Q1-E1-B8
gtaccgatccagaattcgcgggtcgactggaaggtgatctattctaaggatgtcctcgggcagggtacttagatcaggtctgtgaccctaccctaggtacatgactccatcagtgagaagctctggtttgtgagaagcatatacccaaacctaccccaaatgggacaaaaaatttaccacagcatgttgatgccgctcaatgatagcatgcaaagtttcatgaattttagacgagttttggatttactagaatttaaaaaccaggcatctcaatgttttgccgacattcaacggtgccttggtgtttgaaattcattcccatttctttcatgggacctaagcatgcacccaaggacaaagatttgatttttcaaccaacttctatgcactggagcatgtgcatgtagttcaaacttgaattacgcacataaatgcatcgaaatctcacttaatgcataaaaatgt

SEQ ID NO: 11759 - DNA, 466 bp, Triticum aestivum
  Clone ID: LIB31-032-Q1-E1-C7
gtaccgatccagaattcccgggtcgacaacgaggatgaagatggccagaggaggtacaagaggcaaatcctaagggagctttatgcgggaatgaataataggcgtattaggaccaggaactggggctatccatgcccattttgcaaccaaaagcttcatcacacgtataaaagtgttctggcacatgcaagaggacgagccgttggctccttcaagcagatgtattctcccagggtggcacacatcgcgtacactgagtacctagagaagcttcaggatcatgccgacaaatgagatgagatgtgggatcgaactatgtatggctatgtagtgtcttaattataaatgcgcctgagtatgcttaatgacggttgaactatatacttatggtttacctatgcttgtgtacgcttattacctatgtctgagtatgtttaatctatgtttacttgtgtctaaatgtggg

SEQ ID NO: 11760 - DNA, 454 bp, Triticum aestivum
  Clone ID: LIB31-032-Q1-E1-D5
ttcgcgggtcgacttccactgaagcgaagtccatcatcacatcgaaagacgggacacctttgcttctatcaagtggtatcagttttcaggttgctcggtgagattttacagtttttcacagtttagatcgcatctgtcattcatacctacagtccatgaaaaagccacaaaaaaagttagatctgttcatcatttatccaagccagtccgagcctttgcaattttctattcattgcttgcatagttgaattatcggttgcatcgtcgtgtcagttgctggtcttagtgtctagttcctttagagttttgagttctgttcacattagtcacgccgccgctgtatcattatgccttccgctgtccaccatcccatccattaacttccaccacgtgctacgcactgttcattgtcataatcatagttgaggtcattcacatcttcgcctgatccaat

SEQ ID NO: 11761 - DNA, 443 bp, Triticum aestivum
  unsure at all n locations
  Clone ID: LIB31-032-Q1-E1-D6
taccgatccagaattcgcgggtcgacagcggctactaagtgggtggtgggttttcttcgtcgcccgcatcccattctagccggacatagttcagctaaggttctcctgacaaggagagagaccttaatgaatttagcacgtccccgaagggtgagtgctgaaagatgtccgcggaggtgaactccatgatcggcgcccagtcggactcgacgagcacggatatgagcggctcggagtccgtggctgtagatgaatacagtggtttggcgatacgactctcgtaaggggtaaagtcagcatccggctccatcgccactgagagtacggcctccatgacggggtccatcccttcgctctcggatggcgcgacttgctccggatcgatggacggagtatcttcggatgcgatctcncgaatactgtccgacagcagagtggcgtca

SEQ ID NO: 11762 - DNA, 448 bp, Triticum aestivum
  unsure at all n locations
  Clone ID: LIB31-032-Q1-E1-E2
gtccgaaattaccgggtcgactttgggatgaaagtgccaacgggaaatgctgctcgcacgtgtgatctggttttctgcaaaatgctagttacagttgcttggacccttgtttcttgctatcgggtttaaaatccaagcttatctgtttggccatccttacccgtggtttgcccagctaagccgtttgaactatttatgtatctatattgtcatgccttggtacctccctacctgttgtacttgattcatcatgtttgctccgatgtggtattacttaggctgctcaggtaatgagcatattagttgttgctactaaactttctcactccgctgtaatgttatatattgtctctggaagtttaagcttattggtaatgttgctgctacattgttatgtagcatcctccaaaanaaaaaataaaaaaaaaaaaaaaaaagcggccgctct

SEQ ID NO: 11763 - DNA, 469 bp, Triticum aestivum
  Clone ID: LIB31-032-Q1-E1-E5
gtaccgatccagaattcgcgggtcgacgggcggccgtgtacaaaaaccagcaccccagagtagatcagcccctctgcaaatcaggaagctctccccgtctcactggtcaagaggcagcttcagcgagcatgggcggcggcctcgccattgatttgatataaactagcgttagaccaactgttagcttcggttttttagacttgatgaggcagaggctagggggaatgccattcgctgattcgccccccgtcgattcttgcctctggtcagtgtacagttttccgacagagtcgcagccagtgactctctctctctggtagtctgatgatgtttgtaatctgccttgagctgcgctgcttctctataacgatagggcgataggccggctgcgtgactggcaggtgccgtctaatttttggaaatcgcagtaagtttgtcatgtgtcaggattgtgtgatcttggtagggg

SEQ ID NO: 11764 - DNA, 457 bp, Triticum aestivum
  Clone ID: LIB31-032-Q1-E1-E8
actcgcgggtcgacgctactcccatatagtgagtcgtagtaggtcctagtggtgcaagagaagtatcgcggctgggcgttggatggtgtctggaaactccccacggggttcattcaggagtcagaagaaatatacacgggagccatcagagaggtgcacgaagaaacaggggttgacactgaattcgtggatgtggttgccttcaggcacgcgcacaacgtggcgtttcagaagtcggacctgttcttcatctgcatgctgaggcctctgtcgagcgcgatcaagatcgacgaaacagagattcaggcagcaaagtggatgccgctggaggagttcgtgaagcagccgttcatccaggaggaccacatgttccagaagatcatggacatctgcatccagcggctgaggaagtgctactgcggcctcacggcgcacaacgtcgtctccaagttcgacg

SEQ ID NO: 11765 - DNA, 451 bp, Triticum aestivum
  Clone ID: LIB31-032-Q1-E1-F2
gggtcgacagcctagttgcttggttggcctcgagtccgaaaacaaacctttctcttccggcgccaccaaagccaagcttaaacgaattcggaggaccatcttcttttgcctctcaaggctagaagctcttcgtctcagcaaaaacaaagaaaagaactccaccacatatgagttaatttgcatgccaaacaagctcaaagcaagaaactacaagcaatgtctagtaggccgagactaagctaaaaaagtgtaatgtatgtgtcccatagcatgcacacaacataacaaatagctctcaatcagttatctaatccccctcctagtttgcgttgtttcaacaacaaaacccatcaaaaggatcgtgatagtcacaatcaactcgatccgttcaaactgcagagttttcttggtaaattaccaagagtagataagagttctttgcgtaatcgtt

SEQ ID NO: 11766 - DNA, 468 bp, Triticum aestivum
  Clone ID: LIB31-032-Q1-E1-F7
gtaccgatccagaattcccgggtcgacggtgacgaccggtcttgtatctcacaagtacggagagaaagctgctgcggccaccaacgaagggctcgacgctgcaggccacgccatcggaacggcgtgggccgtgttcaagctccggcaggcattgaacccgaagagcgtcctgaaacccacgtcgctcgccaagtccagcatcaaggccggggccgcggaacttaggtcgaagagcagcaagagcgagtagggtctgaagcagtcttcgccgcagccggtcgtatcggggctgatgagatcagaaacttgcatatgtgtagcttgtagatatgtgtgctggaaacagagagcaacctgcctgtcatgtctttccctctgctgatgtgcttcctagttgagtatctgttgcttggttttgttctgtgctctgtaagtcgatgaaatggagttaggtaatcgctgaatttt

SEQ ID NO: 11767 - DNA, 469 bp, Triticum aestivum
  unsure at all n locations
  Clone ID: LIB31-032-Q1-E1-F8
gtaccagtccagaattcccgggtcgacatcgagccagatgcgcatgtcaagcaggcgatgaatgagatcaatgcagctgcaacgatgagggtggctgcaaacgagaaggcggacgctgagaagattgtccacatcaagcgtgccgacggtgaagcataggccaagtacctgtctggcctcggtatcgcccgccagcgccaggccattgtggatggcctgagggacagcgtcctgagcttctcagtcaatgtgcctgngaccactgcaaacgatgtgatggacatggtgctgatcacccagtacttcgatactatgagaacatattggcgcgtcctccaactcctcggcggtgttcatcacccatggccctgctgcggtgcgcgacatcgccacgcagatccgtgacggtcttcttcaacgccagtctgccgctgacaactagcagtttgcttcaccggcatgaactttg

SEQ ID NO: 11768 - DNA, 463 bp, Triticum aestivum
  unsure at all n locations
  Clone ID: LIB31-032-Q1-E1-G5
taccggtccagaattcccgggtcgaccccgccctctcttgacattctccgcacgctttagccgtccgctatgcactggagcttctggaggcctgcgctgaatatgcccaaaccattttaaacgatgttggacaagcttctcctcaattggtgctaccctgactctatctcgtatatctcaaacgatgttggacaaccatctcaactgtttgcttctagtcatggaaactaaataaattttatggttctcatttttcttagtagagggtctgtcctttcccacataatgacatacctcaatagattttttgaatgctctggcagctggaaagtgatgttacattcaggcctctaacatggtcactccattgagttgtgataaatttatttcaccaagttgtcgttccaatcttcagtttgtgacattggttgtctgatatttgtganaattagaacttatgaac

SEQ ID NO: 11769 - DNA, 465 bp, Triticum aestivum
  Clone ID: LIB31-032-Q1-E1-H1
taccggtccaaaattcccgggtcgaccaaagtgagctttggacgtgccaacaccgtcttctaccccatctcggtcttcacaaacttgagggaaccctctggcatccttcccttcccctggaaaatacttaagaaaccaagtcagactactcattgttatcaacataaacataaattgcacaataatttttgttattgtactaaactttaactagtgatatagcaataagtaacagtaatagtagcagtcactagtcagttcgtcaatgctagaagcaaaaccttccgcaacgataccccaatgatggatcgcgtgacagtcactagtcagttcatcaatgccagaagcaaaaccttccgcaacgataccacaatgacagattacggaatgcacgcttatataaacatagacaatcgggcatgtaaaggagaagtacacgccgtgtgtgtgtgggttgtgcgcgtc

SEQ ID NO: 11770 - DNA, 455 bp, Triticum aestivum
  Clone ID: LIB31-032-Q1-E1-H3
gggtcgacatgcaactggggaccctcgacatatagtacgaaacaaaaagtacattttaatagacgaagaatagaaaacagcaagaaaaaatgacaaatgggaataaaagataaaatgagaatgggaagcacgagtaaaaatgaacttgccaaaatttagaacaacaacaaaatccaatattttcaatgaaaaacagaaaaaaaaatctagaaccactactcctccccttgtaatgcaattggaggagataaagaaaatcgatggaaccgctactttcattcacgctctcttcaattctagaatggatctagctgtcatcctctttgtgggtctaaaatatgaataatgataagcataaaaaagaaaacacaagatgagagagaaaaaaccaagaacacaacatacaagtagaaaaatttatcttctagtacatttcagaaattaacccaatctca

SEQ ID NO: 11771 - DNA, 454 bp, Triticum aestivum
  Clone ID: LIB31-032-Q1-E1-H6
attcccgggtcgacatattgtataatattatgcgtccgttcatatacatagccaccgatagcattctcatacgagcatgctttctcgagccatgttggtacatgaacatggacatacacatattcttaggaacaaataagaaagataaatggagaaggaaaacccaaagcaatgtcagagttgacaaaactgcaatggcactttatatatggcctgtcgtgagtgagctgtttaggccttgccggactcctcgcagcccggtggcttgaaggcgatgaagctgacgcactgcacctggcgcatgttgtcgaatccgatgatgcggacatacgcgtcagggtactccttcttgacctcctccacctcgttgatcacttgtgtggcgtcggtgcacccgaacataggcagctttcaacattgttcagtacggccatcatagtacccaaaggatgcg

SEQ ID NO: 11772 - DNA, 440 bp, Triticum aestivum
  Clone ID: LIB31-032-Q1-E1-H7
attcgcgggtcgacaaggtttgtatgatagtcacgaagcagctggcagtccctgatgggacccctgtcacagcggagtcgaaattttctgaacttggtgctgactcactggatacggttgagattgtgatgggcctcgaggaagagttcaacatcaccgtcgatgaaacaagcgcgcaggacattgcaaccgtgcaggatgcaacggaccttatcgagaagcttgtgacagataagacagcgtgagcacctcggttcattggacagctttagaatgcaaaggtgtcatctggaaccgtggacttctgatttttcggtcgcatttggggcgagagaaaataatttatggacagctttgcattcagtctatgttgtgtgttcattaccatttgttatttcttcatcctctcgagattttgtgtcgttgcttagggttaataa

SEQ ID NO: 11773 - DNA, 399 bp, Triticum aestivum
  Clone ID: LIB31-032-Q1-E1-H8
gtccgaaattcacgggtccacgtcctcaccaaagccataatgtcccactgcgtggatgctctcaagaaacgttgagtgtcatcggtgtcctggacgttgtggcaagatcaattcaagcactccacttggcctattcggttgggctcaattgtgtaattcgcccagtgcagttaccgcatgcagatcctgaggatggcacgaaggtgtcacatgccattaatgggacaatgtctcctggagcacagcatgacactgatgagcgtgagctgtctgcactgcaagctgtgatgaagtgcctctaggaccacagactggaggaggactatccggtggacccacctcagacgagggtgattcaactggagaacgccaatgcatacaaaacgaaggctgtcgaat

SEQ ID NO: 11774 - DNA, 456 bp, Triticum aestivum
  Clone ID: LIB31-043-Q1-E1-A1
cgcctgcccgtaccggtcctagattcccgggtcgacggtccggtggcatgtatggggtcattcagtctgtgccctagatgatccgacaattttcctcaggctctatggctacaaatattagcgcctgacggtccggccaagggcctgtgatgcgtctagggttgctctggccaggcaggggatattccatttgtccttttccttgctccgagtccgtgtcttggctatctatccttgcttgttcatgttccttgccttcaaccctaagcatacacaacgttcatgtgttaggcagcccaccattacccctaggcatatcaagtgggtagtcattgaggaaaagattcacctcatgttgtattgccttggctcacgccctcgtcattgcattgtccaatttgcgctttctaacttggcgtagtgatgttcatggtgcctagtttatcataccatcat

SEQ ID NO: 11775 - DNA, 239 bp, Triticum aestivum
  Clone ID: LIB31-043-Q1-E1-A5
gggaagagggattggaagaggagcacgaggaggatatggaagcgtcggaggaggaaggggaggatgtggtggtggggcagatgccaacgttcatggtcccaaagcacatcaataagcgcgccctgaagaacaaggccctctccgtctccctcgacaagaaagccctcaaggatttcgtgactgggtttcacaagagaaagaagaagaggagaaaggaggcgcagaagattacgcaggag

SEQ ID NO: 11776 - DNA, 405 bp, Triticum aestivum
  Clone ID: LIB31-043-Q1-E1-A6
tacaggtccagaattcccgggtcgactcattgccttcaactgtactcagcaccatctttgttacttcttccccacaacccccaggggtgttgaaaaaagtgagtggggaaatcgtcagggcccggagatttgatggggaacatcttgaatagagcgtccttcacttcctgttgcgtataaggcgcgttgagctgagcattcatatcgcttgtcactttatgtggaactatctcaataactctatccacatcttgcattccctctgaagtatatatggttttatagaaagagtttaccatgttttccatctcatcattatcctccgagagactgccatctctgcgcatcaaagctttaagcttagtcttccttgggtcaggaataggcgctcgctaaccgcgcctg

SEQ ID NO: 11777 - DNA, 382 bp, Triticum aestivum
  Clone ID: LIB31-043-Q1-E1-A7
attcccgggtcgacacacggcccgcggaggtgttcttcctgcggtttgaccatatctttgagatgtttctgacaaagcggctcgattttacaatcgtccacctttttacactacatatgagcttcgtcatgaagagagaagaagtctcgcaaatctgtgtggcggatccgtactacatgcacgagtctttcttgagtctcggtgactttgagcgtgaaactgctagggactacctccaaaacttcatggtacagaataaggaccaggaaattggcctcctgccttatcatccaaagtaagtcaattccggacaaccctttcgtacatttcaatcattccttctcgctcatatggagaataatttgaagtgtcgtttccccgc

SEQ ID NO: 11778 - DNA, 429 bp, Triticum aestivum
  Clone ID: LIB31-043-Q1-E1-B7
tccagaattcccgggtcgacaatgctggacgcaccacgggaacgggggctaggcaaggagaacgttattccatcttcagagagccgtcgttgtctcgtctttctgagcaggacacaaaccttaacagatttcgaagacacatctaaaaacggagccctcacaccggcaagggtcgggatccactgtgttctcatgaccgtaaggccaccggagacgaggcggaaccctaattagggaggaggcggcaggttataattcatacgaactgatttgtagttggacggctaggatgacagttgtatccccagccaaccaaggatgaagtcctagattattgatgagtggattttatacatacttttagagtatattatagtgccaaaatccctcacatcatatccatctagcacttagtcatgtctctaatgt

SEQ ID NO: 11779 - DNA, 459 bp, Triticum aestivum
  Clone ID: LIB31-043-Q1-E1-C1
tagccgtccgaaattctcgggtcgactatggaataaggagtggcaagagcctaagattggggatgcccatagcaccccaagatattcaaggataaccaaaacctaagcttggggattccccggaaggcatcccctctttcgtcttcgtctatcggtaactttacttggagctatatttttattcgccacatgatatgtgttttgcttggagcgtcttgtatgatattggtctttgatttttagtttaccacaatcatccttgatgtacacacctttttggagaaacccacatgattggaatttattagaatactctatgtgcttcacttatatcttttgagctagatagtcttggctctagtgcttcacttatactttttagagcacggcggtggcttgattttgtagaaattgttgatctctcatgcttcacttatataattttgggagtcccttaaa

SEQ ID NO: 11780 - DNA, 362 bp, Triticum aestivum
  Clone ID: LIB31-043-Q1-E1-C3
gtcctaaattcacgggtcgaccccttctacatgcatgccaagatcctgggcggcgctagggaccggcaagtcgcgagttcttacctcgaaggcgtcattctggcaaaccaagataaggataacttcctcgtgccttactttcccgagtaagtcctctcctcaaccggcccgtaacatatgaattcctacatttcgatcgtttttcctttaacattccgtgttttcagcagtgacacacgttgcacgctcatcctccttagccccaaatattccatggccacgtatttcgaccctgaacatcagtcgaacgtagactacagaaatgtcaagaaggttcttgatgaggttctccccgggtacgc

SEQ ID NO: 11781 - DNA, 462 bp, Triticum aestivum
  Clone ID: LIB31-043-Q1-E1-C5
gcctgcaggtataggtcctaaattcccgggtcgacacaagaaaaaaaatgaaagcaataagaggcaatggatatcgtttcatccccaaaagaggaacgttcccaaccgaaaaccatcttgcttcttgtgagaagctccggtttgtgagaagcatatacccaaacctgccccaaatgggacaaaatttgtaccacagcatgttgatgccgctccataatagcatgccaagtttcatgaatttcagacgagttttggatttactagaacttaaaaaccaggcatctcaatgttttgcccgcaatcaacggtgccgtggtgtttgaaattcattcccatttcttgcatgggacctaagcatgcacccaaagacacagatttgattcctcaaccaatttatatgcactggagcatgtgcatgtagttcaaattttaattatgcacataaatgcatttaaaactcag

SEQ ID NO: 11782 - DNA, 447 bp, Triticum aestivum
  Clone ID: LIB31-043-Q1-E1-C6
tccagaattcccgggtcgactttgacgatccgactacgaacgtgcgaggacgtcgcgccttagcaatcgctaaaccaactccgagaggttattgaccacgccggagcacgatcaacctgaccacgagggtctgtttcctgcgagcaaacgaagaacaagcaagaaactaagattgcaatctggatattgtgaatataagatgaaagctttattgatcaaggtagggttctgtgacgcctttgtctggtcattgaacacaaacgaagtacgcaaacttgcagctatggtgaacttttaatctaaacaaaacccaaagtctaaacggtgccctaagggctgtatatatggaggaagagagggggaatttcgtggcccttggtggaggggtccgaaatcaaccctatctcctgtttccccacacatacggactctaaaaatagcctatac

SEQ ID NO: 11783 - DNA, 459 bp, Triticum aestivum
  Clone ID: LIB31-043-Q1-E1-C7
gtacaggtccagaattcccgggtcgactcccacaaaaaacgatagctatctcatcgaaacatcaggacaccttcggctctatcagactcttatggcaaaaactgggttcaagagtttttgaatgcacaactagtatctctacgcggtacaaattttgtctagccagtacttcgggatgccgctaatgcaacactaaaatcatagacccttccacgaatctgtatgcgatgcattagtcacaaacggtgatgtaataaaaccgctaaaaaagatgcaaaacgtttgcgatggtggatccatcaaacatggttcaaattttaacaatagaaacgggcagccagatgaaggtgtgtgcgatatgcggcatactattcactcggattaactgtttgtgattaggcaacacaacagaaatggtcagccagatcaaggtgtctgccattgaaggcatacaattca

SEQ ID NO: 11784 - DNA, 468 bp, Triticum aestivum
  Clone ID: LIB31-043-Q1-E1-D1
cgcctgccggtagcggtccgagattcacgggtcgacaggagcaggttggcgacgccttcggagctgaggtcaatgctatggcacagggcgtcgcgttagctgcggagttgggattgctgagagtgagcttcgaaacagattcccagctcctggctgataccatggacctgcataaggccgactcctctgcatactctccagtcattgaggacaccaagttacagctcaagttgtggttctcgcgtcatgtaatcgtgtcttgtaggcgtgaggcgaactctgttgcccatgaattagctagtttgggtcgcttgtgtgaaataaaccactcgatgcagtgggacgatgatgtaccagccgctgttgcagcttgtgtccaggctgatttgccgggacaccgttaagttaaagctactcttttcctcaaaaagtggacacacaaattttgccgaaaaaagaaggagcaaa

SEQ ID NO: 11785 - DNA, 416 bp, Triticum aestivum
  Clone ID: LIB31-043-Q1-E1-D5
cctgcagtacaggtcctgaattcccgggtcgacttccaccaaagcgaaatccaccatctcatcgaaagacgggacacctttgcctctatcaagtggtatcagatttccaggttgctcggtgagattttacagtttttcgtagtttagatcgagtctgttcttcatacctacagtccacgaaaaagccacaaaaaaaattagggttagttcatcatatccgaaccaatctgagcctttgcataatctttttagggttttgctttgttgaatttgcggttgcatcgtcgtttctagttgctggtcttagagtctagtcgtttagagtttcgagttctggtcataagttgtcacgccgccgccgcaccatcatcatcagccctgccatctagcaacaccgcttatccgccaccgcttcg

SEQ ID NO: 11786 - DNA, 404 bp, Triticum aestivum
  Clone ID: LIB31-043-Q1-E1-D6
gcctgcaggtataggtcctagaattccgggtcgaccatgtattcaaatattgttaatcttgtattttcaaaacgttatcaagcatttgaaaaaatgtcaaatgtgtatagaaaaaacgctaatcaaacatttgaaaagatgctaaatgtgtatataaaaaaattaatcatgtattaaaaaaaattaatttgctcttgaaaaagtgttgatcaagaatttaaaatatattaaatgtgcggagtaaaaatgttgaccatgtattcattaaatgttaatcatgtatttaaaaaaatgttaaacctgtattataaaaatgtattagatatataccaaaaatgtgtatagaaaacagtgaaaacccgagaaaaaacgaaataagactgatgaaggacaagaaaagaaac

SEQ ID NO: 11787 - DNA, 463 bp, Triticum aestivum
  Clone ID: LIB31-043-Q1-E1-D7
cctgcagtacaggtcctacattcccgggtcgacactaattactgagacataccaaataatcaatgtcctccgaagatggactatcattgccaatgttcaagttggaaacatgggtgtcgaaaatgagattggagtcggcatacaagtcaagctcccccagcgcggcaagctcagtgaagagttttgactgtgctataaattctggccatgagcaagttctcaaaaataaaacatgccatttcagctacagtacacctggtgcttgccaggatcttgaaaggaccccgctaccccctgatggcattttatgtgtactgggtgagacaagggggtggcattttatgtgtacagtttgtttgaattccggggagattttggcagaaaactgccaccgtcagatctagatctgatggctctgggggtgttcgccaggattgatctgacggctctgggggtgtttgcc

SEQ ID NO: 11788 - DNA, 432 bp, Triticum aestivum
  Clone ID: LIB31-043-Q1-E1-D8
ttcccgggtccacccgttgtactgaatcttcacttggtcgcttggagagggctcggtcgcttgggtttttgaagttggagagaatggatctgtcttttgggtggtgagtgggagaggaagagaggcaccccatttataggcctgtgggtgggagaggaagagagaagggatgagaatggtgcgtgtgtaaatccggacgtgtgtgtgtatccgttaagttttggacccttaaatttttgcacggaaacgatgcatggggcgcgtgcgtgcatttgaatcactgcatatggaagctctttgactgggcgcgtgcatctgactcgctgccgtgatcagaacgactaccgtaatctgaaacaatggcctaactctgaatcaatacgtgcagggccacctagctcgccgaactcgcgtcgctcgcatgcatgcacg

SEQ ID NO: 11789 - DNA, 338 bp, Triticum aestivum
  Clone ID: LIB31-043-Q1-E1-E3
gtccactgagctgctgcaacttatcacattgaacctgcagcttggctgaggctttgaatttgagcttgttttatgtgtggtttgctgccgagttgccgttggtcttctcccagttgtgtgcacatatgttacatgtcttttacatcaagctggaaaaccgtagatttgaactgcagttcctagttctagtccagcaataacattgtaattggtggttaacagcttgagcaaccatttgttttcggtggctgttgccctttagtatgttttttctgatgtgttgaagaagatggactaaaacggaaataaagaggggccggcctagatgatccaagctt

SEQ ID NO: 11790 - DNA, 473 bp, Triticum aestivum
  Clone ID: LIB31-043-Q1-E1-E4
acgcctgcggtagcggtccgaaattcacgggtcgacgtcgcttacgtcgctctccagtcgtgccatgggttggacgtagaagtagaatatgtgaatcatagctagaaatcaactacaaactggcaaaagaagtggaatatttagcaaaaagcaatgctaattagttatttcagatgtgcgattgttgctgaacattaagacaaaagaagtagaataactaaccaatcattaaagttaaagtggaatatttagcaaagtagtgaacccgttgcgcccaatgacgcatagacccgctaaatccaagtccgaactaaaaagaaaacccatgatttaattagtttaattatgggcaagcacatatagtaacaaactgaacactctttagagtaataataataaagaacgcttgcctgttctgtacaatacgatgtacacacacatttaaatttggcaacacaaagtttccaatgaaa

SEQ ID NO: 11791 - DNA, 374 bp, Triticum aestivum
  Clone ID: LIB31-043-Q1-E1-E5
tccccggtccacgcagctgctcggaaagcgacatttcatttgtgtacttagctatatgtgtgtacccacttagatagccgttatccgtcaactgatatgttaccaccacatgcatggttccggtgatgctcaagcagtgcgggagatggagacatcaacgtctcgatatacacacaccgacctactctgaagggagaaaccactttgtaatttgtaacttgctaaccgtgcatgaatggaaaatcatctatttccatgaacttgagcatctgtaccggatcggcacttctactatataagaacagggactgccttgggtaagaaactaaagcggccgctctaaaggatccaagcctacctacgcgttcaagcca

SEQ ID NO: 11792 - DNA, 452 bp, Triticum aestivum
  Clone ID: LIB31-043-Q1-E1-E8
gtaccggtccagaattcccgggtcgacgcgtatcggcaacaggttgtccctcgtcggcctgcccagcgcagcagcgcggttagctcctcccccatcccccaacagatccaaggttcctcggagagagagagagagagagagagagagagagagagtatgtacatgcggaacttcacagtggaggatcgcggggcgccgaggctcaccgtcttcatcgccgtccgggcagtccgttcgtcgccgccgtgcggttggggatttcgagggcggatgtcctctttttgcctgctccgccgcggacggggctaatacggacttcagagcccatatctttttttttttgagaaatttcagagcccatatctaatgtggactcaatgtgcacattcttttagccaactcattgtgggttcatagtgggccggtcaccgtggtctagccagcccaagaaa

SEQ ID NO: 11793 - DNA, 448 bp, Triticum aestivum
  Clone ID: LIB31-043-Q1-E1-F3
gtccgaaattcacgggtcgacgagtgcgaggccgccctcaacgagcagatcaatgtggagtacaatgcctcgtacgcgtatcactccctctttgcatacttcgaccgcgacaacgttgctctcaagggatttgccaagttcttcaaggagtcaagcgatgaggagagaggacacgccgagaagctcatggagtaccagaacaaacgtggagggagggtgaggctccagtcaatcgtcacacccttaacagagttcgaccatcctgagaaaggcgatgccctgtatgcaatggaattggctctagctcttgaaaagctggtgaatgagaaactgcacaacctgcacagtgtagctacaaggtgcaatgatcctcagctgaccgactttgctgagagtgaattccttcaggagcaggttgacgccatcaagaagatctctgagtatgtgt

SEQ ID NO: 11794 - DNA, 437 bp, Triticum aestivum
  Clone ID: LIB31-043-Q1-E1-F6
gtcctaaagtcccgggtcgacacgaaaaatccaacggtgaaaatggttcaacatttggatgcatgattcaagagataaaactttttgaataaacaaactacaaaaaagggaaacttctgttgcgacaagtgatgcactatgcgccacctatcagtgcctgagaagttgaaagtgaccttcgaaagggtaatccttaattagtgatttgtggtaaggttctgcttgctacgggacgcgccaatgcctccctaacagcgagacgtagggcagcctcgcctgggctggcccaacccgcgggaggccacatgccacaacctcttttcctccaatttttcacttttttcaagtttacgttgccaatgcttccaagtaacaattggaaaatattaatagttcatttgaaaagttggtaaatccgtgcaggaaaaatgagtcgg

SEQ ID NO: 11795 - DNA, 448 bp, Triticum aestivum
  Clone ID: LIB31-043-Q1-E1-F7
tccgaaattcccgggtcgactgccaccaaagcgatatccatcatctcatcgaaagacgagacacctttgcctctatcaagtggtatcggatttccaggttgctcggtgagattttacagttttttgtagtttagatcgagtctgttcttcatacctacagtccacgaaaaagtcaaaaaattagggttagttcatcatatccgaaccaatctgagcctttgcataatctttttagggttttgctttggttaatttgcggttgcatcgtcgtgtctagttgctggtcttagcgttagtcttttagagtttcgagttctggtcataagttgtcacgccgccaccgcaccatcatcatcgcccctgtcacctaccaccaccgctccgaatccgtatccatataccaccaccaatccgtatccatataccaccagcgattcatatccatata

SEQ ID NO: 11796 - DNA, 338 bp, Triticum aestivum
  Clone ID: LIB31-043-Q1-E1-G7
attcccgggtcgacttccaccaaagagatatccatcatctcatcgaaagacgggacacctttgcctctatcaagtggtatcagatttcctggttgctcagtgagattttacagttttttgtagtttagatcgagtctgttcttcatacctatagtccatgaaaaagccaaaaaaattagggttagttcgtcccatccgaaacaatctgagcctttgcaaaatcttttctgtatttgctttgttcaatttgcggttgcatcatcgtgtcaagttgctggtcttagcatctagttctttagagtttcgagttctgttcaaaggttgtcatgtcaaccctg

SEQ ID NO: 11797 - DNA, 460 bp, Triticum aestivum
  Clone ID: LIB31-043-Q1-E1-H5
cctgcagtacaggtccaaaattcccgggtcgaccatgtaatataaaaatgatgaaacaaattttctcacttacagaaaaatgttaatcaagcatttgaaattttttgttgaataagtatttgaaaaattgtaaaggtgtatagaaaaattgttgactatgtaataaaaaaatgatgattttctttgatcatatatattgaaatgtaaccaagtatttaaaaaatgttaaatatgtatagaaaaatattgaccacgtaacaaaaaatgatgactttctcatctctctctctctctctctctctctctctctctgtctctgtgtgtgtgtgtgtgtgtgtgtgttaacaaaacatatgagaaatgtgacatatgtttagaaaaatgttgaccatgtgttcaaaaatgtgaataatgcagttataaaaaggggatcacgcacctgaaaaaatgttaaaaagtg

SEQ ID NO: 11798 - DNA, 429 bp, Triticum aestivum
  Clone ID: LIB31-043-Q1-E1-H6
ggtcctaaattcccgggtcgacttctttcctctttgttgattcttatgctgctggtgctttgggctggtaaggcccaggtgacttatcaacgagcccgttgccaaggcaaagcaacatctatatacatacttagcttattaaataccactcaaaaagtaaacttaacttattaaatttgtctcaaaaactaaacttaacttactaaattctgcttaaaaacctatcttattaaattctcaacaggataccaacttagcttattaaagagttttcttaactgaacttaataaagagcgaacgtaggataaaacagatgattccaaaacagagtgaatgtcggaataaaaaaaaacgggggctctagaggatccaggcttacgtagcgttcatgggacgtcagagctcttccagaaggtcacctaaagttc

SEQ ID NO: 11799 - DNA, 378 bp, Triticum aestivum
  Clone ID: LIB31-043-Q1-E1-H7
attcccgggtcgacttccatcaaagcgatattcatcatctcatcgaaagacgggacacctttgcctctatcaagtggtatcagatttccaggttgctcggtgagattttacagtttttcgtagtttagatcgagtctgttcttcatacctacagtccacgaaaaagccacaaaaaaaattagggttagttcatcatatccgaaccaatctgagcctttgcataatctttttagggtttttgctttgttgaatttgcggttgcatcgtcgtgtcaagttgctggtcttaaagtctagtcgtttagagtttcgagttctggtcagaagttgtcacgccgcgcgcgcaccagcatcatcgctttgccatcgaacagcattg

SEQ ID NO: 11800 - DNA, 370 bp, Triticum aestivum
  Clone ID: LIB31-043-Q1-E1-H8
gtaaggtccagaattcccgggtcgactccgtggtggaacccctccgcgagttcgccaaagacatcgtcagcctcgtcaagcgctgccactggcccgaccgcaaatgagttcaccatcagtggacggcgcgcgatcgcgatagggttcgtcgtcatggggttcgtcagcatcttcgtccagctcatcttcatctacaccagcaacatcagcgtcggctccagcaatgttggacgacaggattaccagatgcggggacatcgtgatcccggcaattgagcccgcggtgtgtccatgtacgcgcccaaagtttgttctgaacttgttgttagagacctgacttgtgagacattgtcactatcttcatcatcct

SEQ ID NO: 11801 - DNA, 332 bp, Triticum aestivum
  Clone ID: LIB31-044-Q1-E1-A5
ggtccagaattcccgggtcgacaggatggttacatcgcccacccatatctgcgtgtctgaccctctcgacgacgaatacatgcattgaccagcagtcaatgatagacactattagaatatctttacctttgtaacgtatgctaattttacaagcccgatcattctgactgtgtgtcacatgcctatgcatctgaataaaggtttcttcatcgaatccatatccatcactgacatcatcacctcaatcaaatcatgttgcaacgacatctttgttccactcccagtcatgtcggcattatctactgtgaacgattccatcgttgtggctactc

SEQ ID NO: 11802 - DNA, 422 bp, Triticum aestivum
  Clone ID: LIB31-044-Q1-E1-A7
acggtcctaaattcccgggtcgacgaatcctagctcgagaaggggagaggaggcgacagaaagcgagggagagtgacggacagagacatgaactgattgaccgcacgcgaccagcgagtggataatacagcgcgatgcgggctgggctcaccagataacaggtccaagagcttaacgggcaccacatcgagcccaggagcgaatcggctgaccctaaattggggccagtcaaccaaacccagcccaacagagccacgttcacacccatagaaaagaaagaaacacatgaatctcaaagcatgatccaacggccaaaaagttcgactaaccacaattctaaactcaggcgactgtcatatagctaaagtgaacgtgtgtacaatgtaaaaaaatgtttgtgtgttgtaaaaaaatgtgtcata

SEQ ID NO: 11803 - DNA, 394 bp, Triticum aestivum
  Clone ID: LIB31-044-Q1-E1-B2
attcccaggtcgacccgcgtccccgtaagatgcatgcctaattgtgccatgcggcgtggagaagccccggggccttgctcgtgggtgggtggcgcgccactcccaggagaggagggggcatcagaattcagaagccgagctttggcgaacctggggcactgcggacgtgacgagagaatattagcagcatcctggtggatggcgtttagcgtgcgtggttcggggaagatggagccttcctctggctggctggctggaatttcctttcatttcagttaaaggcaaaacaaatgaatggaatattcgtattctgctgctcctttgcagctattctccgcgaatcctttcttcttctttttttcctttttgccgtggcagcgtaagtgggactggg

SEQ ID NO: 11804 - DNA, 424 bp, Triticum aestivum
  unsure at all n locations
  Clone ID: LIB31-044-Q1-E1-B7
ccggtccagaattcccgggtcgacatggccattcatgtgctgcttgactccttcatctcaacccagaaatttggtgtccagaaggcacttcagaagaatttccggaaatacatgacgtacaagaaggattacaatgaactgcttctgctccttctgcgcaccctggtcaaggaggcgctgcactttgaagaaatcgtgtcgggatcaaccgcacgcctgactcatgtggaggttaaagtggatgacctgaagaacaaggcccaagagtgtgagatctacgacctgaggccgttcttctccagctcgcacttcagcgacaacagttttgtcctggacgaaggacgtgggatcatcaggcatccagttgcagcataacaactcaatcgacctcagctgantgaccatgtgtgatgaacagctacct

SEQ ID NO: 11805 - DNA, 414 bp, Triticum aestivum
  Clone ID: LIB31-044-Q1-E1-C6
caggtccagaactcgcgggtcgacgaaatccactgtcgtcacctgctgtgactgtttctctgagattctaccgtgtggtgcgtgtgccccctctcggaagtcccagccgtacgacaagcacagggctccgcggcctcgcaagggactcttcagctgctgtttctgcaagatcaggccggactgcagaacgaaagctgacgctgtgtacaggtctgaaacccaggaggtgttccatgggtagcgagcatgttgtagcttaagttaggagagatgagcaccgttgaaacaaggctgataatgttctatcattttggtacggatgtgggtggccaaattccattggaagttagatcaatttaggcgagtctttgaactgcagcctgctcctgagttctgactctagatgtgcatcgt

SEQ ID NO: 11806 - DNA, 403 bp, Triticum aestivum
  unsure at all n locations
  Clone ID: LIB31-044-Q1-E1-C8
ggtccagaattcccgggtcgacgtgtggactaaaagtagtagatgcagaaaggagtcggtctacttgtcacggacaatacacatgatcatgcctagatattctcagaattattcacttttctatcaattgctcgagggtaatttgttcaccctccgtaatacttatgctatcttgagagaagccactagtgaaacctatggccccgggtccattctccatcatacaagtttccaatctattttattttgcaatttttactttcaatttatatcataaaaataccaaaaatacttatcttattattatcatctctatcagatctcactcttgcaagtggccgtgaagggattgacaacccctttatcgcgttggttgcgaggttcttatttgtttgtgtanggc

SEQ ID NO: 11807 - DNA, 399 bp, Triticum aestivum
  Clone ID: LIB31-044-Q1-E1-D4
attcccaggtcgacatagctaaaacactaggtgattaaaccgaatcacacagaacaagggagtccttgctctgataccaattgaaagtgctagttatcgactaggggggggtgaataggcgatttttatgaaagtcttcaaaacatgagagttttgtagaaaaacaatagaaataaacctattgacatgcagcggaaggtagactacactagacaagccatagccaagtactcaatgaactgaaaacacgaagactattagcagctaggtagtatggatcaggatggaagatagtgtgaagccaaactacattagtcatcacacagtgaagtcaaacagataatgcaagcaggcaatgacttcacaaggacaaactgtaagtaaagagaagtaagaggt

SEQ ID NO: 11808 - DNA, 418 bp, Triticum aestivum
  Clone ID: LIB31-044-Q1-E1-E2
attcccaggtcgacatcgacccagatgcgcatgacaagcaggcgatgaatgagatcaatgcagctgcaaggatgagggtggctgcaaacgagaaggcggaggctgagaagattgtccagatcaagcgtgccgagggtgaagcagaggccaagtacctgtctggcctcggtatcgcccgccagcgccaggccattgtggatggcctgagggacagcgtcctgggcttctcagtcaatgtgcctggcaccactgcaaaggatgtgatggacatggtgctgatcacccagtacttcgatactatgaaagagattggcgcgtcctccaagtcctcggcggtgttcatcccccatggccctggtgcggtgcgcgacatcgccacgcagatccgtgacggtcttcttcaagggcaatctgcctc

SEQ ID NO: 11809 - DNA, 416 bp, Triticum aestivum
  Clone ID: LIB31-044-Q1-E1-E4
attcccaggtcgacaacctctacatatcacacatccaggtgaaccaagcccaaaagcagaggcgccgtacataccgtgctcacggacgcatcaatccttacatgtccaacccctgccacattgagctgatcttgtcagagaaggaagagcctgtgaagaaggaggctgataacgtcgtcgcaccaaggaaaactatctaagctaccggaatggatgcattcgtccaacagtcttagttgtagttcttctcaagtacctttgttggcagtgtttgttgcctccttgatgtttttgttaccaacattgagtaaggatttgttaaggttgatgctatccttgtgattgcgagtggtctttatatgctaaaacagtttcagatatttgagcattagcacaccagaacttatttctcagag

SEQ ID NO: 11810 - DNA, 413 bp, Triticum aestivum
  Clone ID: LIB31-044-Q1-E1-E5
ccggtccagaattcccgggtcgacatcgacgagagattttcgatcaacttcgtctttcagtcgtcgccgccaagacatcaacaatgccgcccaagcctcccaagaagcccaaggcccagaagaaagagtacgacgagacggatctggagaacttgaagaagaagaaagaggacgagaaggccgtcaaggagctcaaggccaaggctgcgcagaagggcccgctcggaggcgccggtctcaagaagagcggcaaaaagtgatctgctcgttttccaaaacttattgtctgtacttagaaagcctctgaagaaaaatggcccacgaaaaactactttagatagttgattttggtccagtgtttggggtctccctttcgtgtatgaattgagtttttgacgacactaagccagaaa

SEQ ID NO: 11811 - DNA, 428 bp, Triticum aestivum
  Clone ID: LIB31-044-Q1-E1-E6
taccggtccagaattcccgggtcgacgaagacgacagaagggagaagatgaagaggaagaggtgatcactgaagagggtttacaaaccatattggataagctgcgtgttcaacaccactattgcctttactgtggatgcaagaaatgtagggaaaggctgcgtactatagacccaaagtggtcggacccttccctggaccctgcgcaagcgggagctacatgcaccagtttgaatcagcaggagcactggcaaatgaatgccctgggcctaatgaagatgatcactgatccactctgtcaatggtgacaagggcactgtccttcccactgcagattatggtaaatgtgacatttgggatattcttgattagttgactgtgtacggttaaccttagtccttaacacaatcactggttcatagccaactg

SEQ ID NO: 11812 - DNA, 391 bp, Triticum aestivum
  Clone ID: LIB31-044-Q1-E1-E7
ggtccaggattcccgggtcgacatacttcgcgaatggcagcagtattcacatctagcagcatggcagcagaccagttttttttcttttcctgcatgtgtttttcttttcttttttattttctttagtatggatctatctctctgatcaagcaagaagagatcggcagctccagcgacatgacgagccgtttccgggtttttatgaagggaactatttggggtcgcgcggaagcaaaactagctagggtttattagtgctgctctagttccgcttgctattcctttcgcttgttcgtttgtttctttaaggattttattatcaaggttgtaaggctggggatgtgcagctagcttcagattcaagcctgccgtctcgcctgcttgtacattg

SEQ ID NO: 11813 - DNA, 425 bp, Triticum aestivum
  Clone ID: LIB31-044-Q1-E1-E8
ggtccagaattcccgggtcgaccatacattacagagggggcagcagagccttgtcacatgggccaccccaagactgagtgaagataaggttaggcaatgtgttgactcaagacttggaggggactatcctcctaaggctgttgcaaagtttgcagccgtcgcggcattgtgcgtccaatacgaagccgacttccggccaaacatgagcatcgtcgtcaaggcgctccagcccctgctgaatgcgcgagcagcccaccctggggctgagcatgccggacgctaagctccactccttgtatgatataatagataaggaaaaatgagccatcaattgttgttcttgccgggcgcgtggcaagcggtttttgtacatttgtgattattcttcccaagttgtaaccctcgagattctagtaccagaaata

SEQ ID NO: 11814 - DNA, 110 bp, Triticum aestivum
  Clone ID: LIB31-044-Q1-E1-F2
tacggctgcgacaatactacatacagggcattcatttttaaagcattcacaaacttgacaaactatagggtgaatattcaaaatagtcatgaatttgaaaaatacattaa

SEQ ID NO: 11815 - DNA, 416 bp, Triticum aestivum
  Clone ID: LIB31-044-Q1-E1-F4
attcccaggtcgacgacggagaagaagaagaggcgatggcgtccgggtggggcatcaacgggaacaaggggcggtgctacgacttctggctggacttcagctcgtgcatgagccgctgccgccagccctccgattgcggcctcctccgcgaggactacctcgagtgcctccaccactccaaggagttccagcgcaggaacaggatctacaaggaggagcaacgtcagataagagctgctgctcgcaaggccaaggaggaagccgaaggagctcctgctgttgcagctcaccactagcatccgtttttatttgctgcaagtgcttccatgttcggctatgagcaaggcaataatttcctaaacattctaccctcccactccatgacttgttctaaaatcatgagttcgataaacaac

SEQ ID NO: 11816 - DNA, 432 bp, Triticum aestivum
  Clone ID: LIB31-044-Q1-E1-F6
ggtccagaattcccgggtcgacttccaccaaagcgaaatccaccatctcatcgaaagacgggacacctttgcctctatcaagtggtatcagatttctaggttgctcggtgagattttacagtttttcgtagtttagatcgagtctgttcttcatacctacagtccacgaaaaagccacaaaaaaaaattagggttagttcatcatatccgaaccaatctgagcctttgcataatctttttagggttttgctttgttgaatttgctgttgcatcgtcgtgtctagttgctggtcttagagtctagtcttttagagtttcgagttctggtcataagttgtcacgccgccgccgcaccatcatcatcgcccctgccatctaccaccaccgctccgaatccgtatccatataccaacaacaatccgtgtccatata

SEQ ID NO: 11817 - DNA, 427 bp, Triticum aestivum
  Clone ID: LIB31-044-Q1-E1-F7
ccggtccagaattcccgggtcgacgtccagcaagaagctcaaggagttttaatgggccacattaaaatctgtgagctcgcaggaacagggcagtaaccttttcatccccttgcatactgtttgaggaaagagttcttagtaaacagttgagaacttctgtatatctccatatggcattgtagaacttaaaaggtgatttacaaagaagtgatttacaccctctctctgctatctataaaaattgtgacaatggaagcttgcatttctccatatcaagaacgggagtatagattctaatcgcagagatttctctcttttacagcgaggtcatgttccatctgagccttgctacatactgcgattctaatagcatcttcttccttaaatctaacagctcgattcctcgctcgtacataagaaggcaatg

SEQ ID NO: 11818 - DNA, 389 bp, Triticum aestivum
  Clone ID: LIB31-044-Q1-E1-G3
cccgagtcgacggccattgggtcattcaaggagcagttgatgtggacattggagccaatccctctgctgagggtggtggtgatgatgagggtgtcgatgaccaggccgtgaaggtggttgacattgttgacaccttccgtcttcaggagcaacctgcttttgacaagaagcagtttatctctcacatgaagcgctacatcaagaacctctctgccaagcttgaaggggatgacctagatgttttcaagaagaatgttgagtctgccacaaagtatcttcttagcaagctcaaggaccttcagttctttgttggcgagagcatgcatgatgatggcggcgtggtgttcgcctactacaaggagggagctgctgatccaactttcctgtac

SEQ ID NO: 11819 - DNA, 419 bp, Triticum aestivum
  unsure at all n locations
  Clone ID: LIB31-044-Q1-E1-G6
ccggtccagaattcccgggtcgacaaccccgataagagtcgcacgtatctcgttctcaggacacaccggataagcgaagcgtataggtaccgacataaccaaagttgccaagggatggtcccgcacggtgctctagtttggaccaacacttagacaagcattgtcccaggggggctaaaataaagataaccctcaggttaattactcccaagggaaaggtttaagtggtatgcaaatggtaaaaccaatgttgggccttgctggaggagttttattcaaggcgaactgtcaagggggtcncataaatcacccaaccgcgcaagggacgcanaatccggcaacataacaccggtatgacgggaactagggcggcaagagtggaacanaacaccaggcataaggccgagccttccaccctt

SEQ ID NO: 11820 - DNA, 431 bp, Triticum aestivum
  Clone ID: LIB31-044-Q1-E1-G8
ggtccagaactcccgggtcgacgagatgacgaagcgcaccacgaaggctggaattgttggcaaatatggtacacgttatggtgccagtttgcgtaagcagatcaagaagatggaggtgtctcagcactccaagtacttctgtgagttctgcgggaagtttgctgtgaagaggaaagcagttggaatttggggatgcaaggactgtgggaaggtgaaggctggcggtgcttacaccatgaacactgccagtgcagtcactgtcaggagcaccatccgtcgcttgagggagcagactgaagcataagttgctaccggcagtgttttgtcctaaggaattatctgttttttgcagtttagacgatactttggattcagttctgttggctgtttagtcaagggtatctttgtacttggtgccatggatggttttg

SEQ ID NO: 11821 - DNA, 448 bp, Triticum aestivum
  Clone ID: LIB31-047-Q1-E1-A2
cgcctgccgtcaccggtccgaaattcccgggacgacggagaagaagcagttgaacccgatgcgggagatcaaggtgcagaagcttgtcctcaacatctccgtcggggagagcggcgatcgcctcactcgcgctgccaaggtgttggagcagctgagcgggcagtcgccagttttctccaaggcgaggtacactgtcaggtcttttggcattcgtcgtaatgagaagattgcctgctatgtgacgatcaggggtgagaaggcaatgcggcttctcgagagtgggctgaaggtgaaggagtacgagctcctgaggaggaacttcagtgacactggttgctttgggtttggtattcaggagcacattgatcttggcatgaagtatgacccatcaaccggcatctacggcatggacttctttgttgttctggagccagctggataccgtgtc

SEQ ID NO: 11822 - DNA, 392 bp, Triticum aestivum
  Clone ID: LIB31-047-Q1-E1-B3
cgcctgccgtcaccggtgcgagaattcccggatcgacgctgccattgctaaagccaaggaaagtcctatgcctgatgcttctgagctctttacaaatgtctacgttaagggtttcggcgttgagtcatttggcgcagacagaaaggagttgagagctacactcccataggtcaccaacctgaagatgaagatgagtactcttctaacacgttgagatatcgaggagaaataagcatcagtgaacaaacccttgggtgttgctggcagtttttgttgcaaaacgaacctgtatagagatgtgatgtcaggggaattcgttccttatttgttttgttttcctttttttttcttctgcaattcagtttaactgctgctggctggcttcctattga

SEQ ID NO: 11823 - DNA, 437 bp, Triticum aestivum
  Clone ID: LIB31-047-Q1-E1-B5
cgcctgcaagtaccggtccagaattcccgggggccgcttttttttttttttttttttttttttttttgcttcccaaaggaaacacacagaaaactctcgtccaaacattcacttctccagcgtaacaaagagtggtattgttatcttctgcacatattacatcctgcttgcggaatttggcacatcgtgctcgagtacaaatttgaaaagggagcaggagacgaaaagaatgacatttctatagtatataaaaagggaggagagagaaaaaaggtaaaactatggatccacgctattgtacagttatgctattagggggttggttattcacaagcagtgtcacaagatgctgcctaccaaccataggtgcaggaagagccaatacgccaagagtcctagccttgctcgcggccggttcatcagaatttggctccctg

SEQ ID NO: 11824 - DNA, 200 bp, Triticum aestivum
  Clone ID: LIB31-047-Q1-E1-C1
cgcctgcagtcaccggtgcgagaattcccgggtcgacgccgacacccaataccgggcactatgtcatgctccagacatggacatgtgccacaagaacttcaaacgacattcccaggttgacatcgagattgacatcaagcgtatcccaaatacggtaactttgattcaggacatggatgaaccacatgtgaaccccaaat

SEQ ID NO: 11825 - DNA, 381 bp, Triticum aestivum
  Clone ID: LIB31-047-Q1-E1-C2
cgcctgccggtaccggtgcgagattcgcgggacgactccttctacatgcgtgccaagatcttgggcagcgctggggaccggcaaatcgcgagttcttacctcgaacgcgtcattctggcaaaccaggataaggagaacttcctcgtgccattactttctcgactaagtcctccccacaatcggaccgtaacatatgaaatcatacattttgatcggtattcgtatagcattccgtgtggtcagcagtgacatacgttgcagggtcatcctcatacgtccaatataatccaatgttacctctatatactcggaccgtcactcgagagtacacgagacaaaggtcaacaaggttcctgatgaagttcaccccggctacacaca

SEQ ID NO: 11826 - DNA, 302 bp, Triticum aestivum
  Clone ID: LIB31-047-Q1-E1-C3
cgcctgccattaccggtgcgagaattcccggatcgacttccaccaaagcgatatccatcatctcatcgaaagacgggacacctttgcctctatcaagtggtatcagatttccaggttgctcggtgagattttacagtttttcgtagtttagatcgagtcggttcttcataccaatagtccacgaaaaagccacaaaaaaaaatttagggttagttcatcatatccgaaccaatctgagccttgcataatctttttagggttttgctttgttgaatttgcggttgcatcgtcgtgtcaagttg

SEQ ID NO: 11827 - DNA, 307 bp, Triticum aestivum
  unsure at all n locations
  Clone ID: LIB31-047-Q1-E1-C4
gcaggtggctccatccaggaagtggtgggcctgagttcccgacggcccccgactgttactttgaggcgaagcgacagggcaggttgagaccacctangagagaggtgggcctggccctggtcggcgttcgcgaatacttaacacacttaacgagatcttggtatttgatctgagtctggctactggctatacgcactaaccatctacacggggacatttatgggcactcgacgtcgtggtatcagctgaagccttcgtgacgttagcgactgagcggcgcgcgccaggttggaccgcgtaacgcaac

SEQ ID NO: 11828 - DNA, 380 bp, Triticum aestivum
  Clone ID: LIB31-047-Q1-E1-D1
agctgcatgtacggtcaagaattcccggatcgacgaacaccagcagcaactgataggtgtaagccatgacgtctacacgcacatatttggagcagagctcgcaacatatatacaacatataagtagagagattatggttgctgcgtatcagtatatatagattattaccccggaaaagaatatagattattctataaggttactctatagatgaagaagtaattcatcagctctagctaagctgggtatagaacagcaggtgttactgaatatccgatctatgtacatgttgtgtaatcgagattattgtgggaatatgctaatctcctgaaaaaaaaaaaagaatggtagggaaaagaaagcggccgctctagaggatc

SEQ ID NO: 11829 - DNA, 420 bp, Triticum aestivum
  Clone ID: LIB31-047-Q1-E1-D3
cgcctgccattaccgggctagaattcccggatcgacgaagacgacagaaggggaggtaaggagtggtacaagaaatagggtggctaaactgacaatgcccgtcttcactgccgtcttggtgatggccctgttgatcactgcatcatcttcaggagaagtttcaacgacagaacgtgatagggatgcctccaaagtgacaaagggtcacacttctctttaccatcttcagatgcagagccacagcaggatgaggattctgacggattttctggactacgactacggaggagccaactccaaacacgatccacacaggaggcccgggaatgggggacattaggcactagataatagctagctctcccaaccattcgacagagtccggtgttttggactggtgtcatgtgtgtgcgtattcac

SEQ ID NO: 11830 - DNA, 363 bp, Triticum aestivum
  unsure at all n locations
  Clone ID: LIB31-047-Q1-E1-D4
ggtcctaaattcncgggacgacgaaacttcttcttttttagcagagcttccaggcaagcaaaccccccttgagcattctgatatcgcccatttctttccctctcatgcttgcattagaactgctactgctttatgtatgatcctactctgatgcatagcctgttttgttacctgctttcataccttacctgcttatcctaaactgcttagtataggttggatactgatccatcagtgacccccaccttgtccaagttgcctcgctttatgttagatgactcgatcaacgtgatcgatgtccaggccccgacaccgcacatcaccccccccccttagttgtaggactctgtacagttaccatcg

SEQ ID NO: 11831 - DNA, 425 bp, Triticum aestivum
  Clone ID: LIB31-047-Q1-E1-E1
cgcctgccattaccgggcaagaattcccggatcgacatcgagccggatgcgcatgtcaagcaggcgatgaatgagatcaatgcagctgcaaggatgagggtggctgcaaacgagaaggcggaggctgagaagattgtccagatcaagcgtgccgagggtgaagcagaggccaagtacctgtctggcctcggtatcgcccgccagcgccaggccattgtggatggcctgagggacagcgtcctgggcttctcagtcaacgtgcctggcaccactgcaaaggatgtgatggacatggtgctgatcacccagtactttgatactatgaaagagatcggcgcatcctccaagtcctcggcggtgttcatcccccatggccctggtgcggtgcgcgacatcgccacgcagattcgcgatggtcctcttca

SEQ ID NO: 11832 - DNA, 413 bp, Triticum aestivum
  unsure at all n locations
  Clone ID: LIB31-047-Q1-E1-E3
cgcctgcagttaccgggccagaattcncggatcgaccccttctacatgcgtgccaagatcttgggcagcgctggggaccggcaagtcgtgagttcttacctcgaaggcgtcattctggcaaaccaagataaggataacttcctcgtgccttactttcccgagtaagtcctcccctcaaccgccccgtaacatatgaattcttagatttcgatggtttttcttttaacattccgtgttttctgcagtgacacacattgcacgctcatcctcctaagccccaaatattccatggccacgtatttcgacccggaccgtcagtcgaacatagactacacaaatgtcaagaaggttcttgatgatgttctccccggctacgtcaaatctggaggcactttcaacaggcctattcgtaa

SEQ ID NO: 11833 - DNA, 434 bp, Triticum aestivum
  Clone ID: LIB31-047-Q1-E1-E4
cgcctgccggcaccggtgcgagaattcccgggacgacgaaggagacggacgccgctagctcgtagatggatgtttatgtgcggcaaatcgcaaggtgcatgcatgcgcgtgttttacttatgggtatgtgtccctattttcaagagtcatgtacagatagagattgtatgcatcagatcagatcgtaattcttatctcaacttttaaacatgtacgtaaaactcaaaatatagttacgacccaaccaaagttattccttttaccggatctatctattgaacaattaaacctgcacattttgtgaaactagcaacaagcccggatcttgtggttcaacataaatcttgtcggagtaacatttaattttgatttgagcatgggtactggaagacaagtaaagtttcatttagttgagattaccgtatgaaatattg

SEQ ID NO: 11834 - DNA, 428 bp, Triticum aestivum
  unsure at all n locations
  Clone ID: LIB31-047-Q1-E1-F1
acgcctgccgttaccggtcctaaattcncggatcgactcaaagatcctctccaaggtcattgagtactgcaagaagcacgtccaggccagccccaaaccggctgactccggcgccgtcactgacgccaactcctccacctccactgcagccgccgcccccgtcgaggacctcaagagctttgacgctgagtttgtcaaggtcgaccgggccaccctcttcgacctcatcctggctgcaaactacctcaacatcaagggattgctcgaccttacttgccagactgttgccgacatgatcaaggacaagactccggaggagatccgcaagatttttaacatcaagaatgatttcacacccgaggaggaggcggaggtccgcaaggagaaccagtgggcttttgagtgaaagtagtagcatctaggcaatg

SEQ ID NO: 11835 - DNA, 425 bp, Triticum aestivum
  Clone ID: LIB31-047-Q1-E1-F3
attcccgggtcgacatggccattgcgtcgcgctcgcccagctccgacatcgccagggtcttcatcgacaagctcgagctccagcccatgttcgtcgcacaggaaatattctccagctggactcacaagacagagcatttccaaaagatccacagaaaaactggggttccatacaagtccatgccgttctttgacgatgaggacaggaatattcaatcggtatcgaaaatgggagttacgagtgttctagtaaacaacggattgaatctcgacatgtttaagttgggcctcagtaatttcgctactactgttgctgcatctgaacccgcacctgcaccagaggacaattaaccttatattgtacaagtaaaaacagcagacagggaaaacgcccatgatttacgggatacgtgtggaaaaataaac

SEQ ID NO: 11836 - DNA, 397 bp, Triticum aestivum
  Clone ID: LIB31-047-Q1-E1-F6
cgcctgctagtaccggtccagcattcccgggtcgacttccaccaaacaatatccatcatctcatcgaaaaatcaggaccctcgcctctatcaagtggtatcagatttccaggttgctcggtgagattttacagtttttcgtagtttagatcgagtctgttcttcatacctatagtccacgaaaaagccaaaaaaaaaattagggttagttcagcccatcggaaccaatctgagccttgcataatcttttctgtatttgctttgttgaatttgcggttgcatcgtcgtgttcagttgctggtcttagcgtctagtcttttagagtttcgagttctgttcacaggttgtcacgccgtcaccgcaccatcatcatcgccctgccaactaccagcagcgct

SEQ ID NO: 11837 - DNA, 429 bp, Triticum aestivum
  Clone ID: LIB31-047-Q1-E1-F7
taccggtccagaattcccgggtcgacttccatgtggatgggaaaaagaaagtacaaaaactataaaataaaataaagttaaataataaaattccccatattatgcgtgtttcgatctcatcgccgcacaagtctcatcacaattgcagacgtgttttaccccttgagtcgcacgtagtttgagatgcacgcaattgcatacgtgttgcaccctcgtagttgcatgaattccgatagttctagttgtacgtaaggggaacaagagtttttgtgacaaataaaaagaaaagtcaacaatttttctgtcaacctgatgtaggaaacatagggcatatcaacattacgaaaatatattcctgggtaatacatgaatgaaacaattttttttagaaaaaagaacaggcaacatacaaataaacaaaaaatccat

SEQ ID NO: 11838 - DNA, 456 bp, Triticum aestivum
  Clone ID: LIB31-047-Q1-E1-G1
cgcctgcaattaccggtgcgaaattcccgggacgacatggagacggtatcaagagagaacctcagacggctgttcatgtacataaacaagctccctctgatcgtgcctgatgtcatcttcagtgtctacgattcccacataaaatgaatggtgcggcactccccttatcaaggtcctcagccaagtgcccagctccttttaatctatttgggaagctcccccaagctctctggtttccatgcctgtacccaagcccttcgaagtgcctgaactgtcgcatttgtagtcgcaaaccttttgtttgtgctttagatcttatttagtgcgtacctgcatgcttaagctaagcatatccagccagtttgtatatatctcacatggctctgttaatagagaactgtagctggccccaaatggaggcggtgctgtttaatatcctcccatgtcccccccccc

SEQ ID NO: 11839 - DNA, 442 bp, Triticum aestivum
  Clone ID: LIB31-047-Q1-E1-G8
gccagtaccggtccagaattcccgggtcgactactacattcccgtgttcttcttggaggtttctgtagttaaacctgaggagttatgtgaatcagcgcacctctgcccaaagggggcagcgactcggtcgtccacacgaggggatgcctgtggtctatgccatcatgttcttgttgaggttcttatgatgcttaaggatcccaacaccaagctggagatagtcgggcttcttttcaaaacatgcagcaaggcgaagaactacgaaccgcagtgcaagaggcttgtccttgactacatcccactgattctggtgaagacccaggagttccttgagacgacggacgtctgctttgcgacacatgcctgtaaaacatgcatgcaagcaaccattcctctctccgccgctttgtgaagaacaaatatgttggggatatacaggggc

SEQ ID NO: 11840 - DNA, 454 bp, Triticum aestivum
  Clone ID: LIB31-047-Q1-E1-H3
cgcctgcccgtaccggtcctagattcccgggtcgacatatggggagctaatgcggaggagttcgatccatcgaggtttgcagatggcaagagctaccaccttggcgcgtacttcccctttgggattggccctgccatctgtgttgggcagaatctcgcgatggttgaggcaaagctggcgcttgcaatggtcctccaacggtttgcgcttgatgtctcgacgtcctatgttcatgcgccgatgaaggtgatgaccctccaaccccagtacggtgctcaacttcttgtccacaagatctgaaccttgtgtggtgctgtctatggagttgggaggtttggcagcaaggtatatgtgaatgtgatgtccccgcgtctcctgtatctctgttgacaacttgtccgaagtttgtcctgaaaatgtgtacagaaagtagtatatgcttcgcgacagtaaa
